(19) United States
(12) Patent Application Publication
(10) Pub. No.: US 2004/0162679 A1
(43) Pub. Date: Aug. 19, 2004

(54) Method for predicting gene potential and cell commitment

(76) Inventor: Linheng Li, Leawood, KS (US)

Correspondence Address: POLSINELLI SHALTON WELTE SUELTHAUS P.C., 700 W. 47TH STREET, SUITE 1000, KANSAS CITY, MO, 64112-1802, US

(21) Appl. No.: 10/430,201

(22) Filed: May 5, 2003

Related U.S. Application Data
(60) Provisional application No. 60/377,383, filed on May 3, 2002.

(51) Int. Cl. G01N 33/48

(52) U.S. Cl. 702/20

(57) ABSTRACT

The present invention relates to methods of associating nucleic acid sequences of unknown function with particular sub-populations, and methods of associating cells of unknown function with particular sub-populations. The method includes collecting hybridization data, developing a gene expression map, and comparing a nucleic acid sequence of unknown function to the gene expression map to determine in what sub-population the gene is expressed. The present invention also relates to kits, arrays, maps, isolated sequences, and clustered sequences.

[0001] This application is a non-provisional patent application based on U.S. Provisional Patent Application Serial No. 60/377,383, filed May 3, 2002.

### FIELD OF THE INVENTION

[0002] The present invention relates to methods for predicting gene potential and cell commitment, in particular, the present method relates to using known clusters of genes to predict functional and commitment potential of genes and cells of unknown functions. Further, the present invention relates to a family of nucleic acid sequences and genes. The invention relates to arrays, gene clusters, gene maps, and methods for making such products.

### BACKGROUND OF THE INVENTION

[0003] Hematopoietic (blood) stem cells (HSCs) are clonogenic cells, which possess the properties of both self-renewal and multilineage potential giving rise to all types of mature blood cells. HSCs are the critical subset of cells in the hematopoietic system that undergo proliferation and differentiation to produce mature blood cells of various lineages while still maintaining their capacity for self-renewal. Hematopoiesis is a dynamic process with significant complexity in which the HSCs give rise to cells of both the myeloid and lymphoid lineages. In addition, HSCs have the ability to self-renew to produce more HSCs. This property allows HSCs to repopulate the bone marrow of lethally irradiated congenic hosts (a host that differs from another with respect to a small chromosomal segment). It is known that HSCs give rise to lymphoid and myeloid cells. Lymphoid cells will further differentiate into T, B, or NK cells. Myeloid cells will further differentiate into granulocyte, monocyte, mega-karyocyte, or erythrocyte cells. Recent reports indicate that murine HSCs also have the potential to trans-differentiate into multiple non-hematopoietic tissues. This suggests that HSCs have greater developmental potential than assumed previously. However, the underlying mechanisms of maintenance of multipotentiality in HSCs remain largely unknown. It is desired to have methods available for understanding such mechanisms.

[0004] Differentiation is the complex of changes involved in the progressive diversification of the structure and functioning of the cells of an organism. For a given line of cells, differentiation results in a continual restriction of the types of transcription that each cell can undertake.

[0005] Early hematopoiesis is a process of progressive restriction of developmental potential, accompanied with a hierarchical array of self-renewing and multipotent HSCs, non-self-renewing but multipotent progenitors (MPPs), and lineage restricted common lymphoid progenitors (CLPs) or common myeloid progenitors (CMPs). However, the mechanism behind this progressive restriction in developmental potential is not clear. As stated, the hematopoietic system includes HSC, MPP, CLP, and CMP populations. When grouped together, these four cell populations can be referred to as bone marrow stem cells, since all of these populations can be found in the bone marrow.

[0006] Early HSC development displays a hierarchical arrangement. The arrangement starts from long-term (LT-) HSCs, which have extensive self-renewal capability. Next is the expansion state, corresponding to short-term (ST-) HSCs (having limited self-renewal ability) and proliferative multipotent progenitor (MPP) (having multipotent potential but no self-renewal capability). MPP is also a stage of priming or preparation for differentiation. MPP differentiates and commits to either common lymphoid progenitor (CLP), which gives rise to all the lymphoid lineages, or common myeloid progenitor (CMP), which produces all the myeloid lineages. During this process, the more primitive population gives rise to a less primitive population of cells, which is unable to give rise to a more primitive population of cells. The intrinsic genetic programs that control these processes, including multipotential, self-renewal, and expansion (or transient amplification) of HSCs, and lineage commitment from MPP to CLP or CMP, remain largely unknown.

[0007] The limited number of the hematopoietic stem cells in bone marrow together with an inability to maintain these cells in culture in an undifferentiated state has greatly hindered the characterization of these cells. As such, it is desired to have a method for characterizing the various cell populations, which form the bone marrow stem cell population. In particular, it is desired to have a method that allows for analysis of the intrinsic genetic programs of HSCs.

[0008] There are many hypotheses to explain the special behavior of HSCs with regard to the decision-making process by which HSCs choose cell fate between self-renewal and differentiation, arresting and proliferation, or CLP and CMP. These include, for example, the “instructive” model, the “deterministic” model, and the “stochastic” model. The “instructive” model emphasizes the important roles of extrinsic signals such as cytokines in directing cell fate determination. In contrast, the “deterministic” model indicates that it is the intrinsic genetic programs that determine the stem cell fate. The “stochastic” model proposes that cell fate determination is a random event and that the extrinsic signals play a role in selecting one of the possibilities by increasing the cell survival ability or proliferation capacity that favors a particular hematopoietic choice or lineage.

[0009] Recently, a hypothesis of “grand-state configuration” of stem cells has been raised. The “grand-state configuration” hypothesis proposes that stem cells maintain a multi-program accessible state determined by their multi-open chromatin structure, allowing accession of different transcriptional factors that can lead to different cell fates. With the progression of development, multi-program accessibility becomes restricted. This model is supported by low levels of expression of multi-lineage affiliated or promiscuous genes in stem cells/progenitor detected by RT-PCR. To further clarify these models and provide insight into the molecular mechanisms that control stem cell fate, it is desired to analyze genome-wide gene expression profiling during the early progression of HSCs self-renewal, expansion, and lineage commitment.

[0010] As such, it is believed that the early process of HSC development involves interactions between the intrinsic genetic program and extrinsic signals from surrounding stromal cells. This dynamic progression is accompanied by global changes in gene expression profiles at different stages. These differentially expressed gene sets at different stages of early proliferation and differentiation in turn determine the fate and behavior of HSCs. Methods which elucidate the process of cell commitment can be used to further explain this process. It is also desired to have methods and information which detail and explain the global changes in the gene expression profiles.

[0011] A large number of genes that are predominantly expressed in either fetal liver or adult bone marrow HSCs have been discovered and analyzed by gene-expression profiling using array and sequencing technologies. Genes identified in these previous studies are helpful in providing HSC selectively-expressed candidates that might be responsible for self-renewal of HSCs. These genes were identified by subtracting mRNA expressed in HSCs from mRNA expressed in mature cells (such as total bone marrow cells or AA4.1⁻ subset of fetal liver hematopoietic cells). This method provides a limited view of what happens. A majority of multilineage-affiliated genes have been excluded using this process, which may lead to a loss of important information regarding the entire gene expression spectrum in HSCs. This is problematic because it is known that systematic genome-wide profiling of gene expression without pre-excluding multilineage-affiliated genes in functionally homogenous hematopoietic stem and progenitor cells is important for understanding the underlying molecular mechanisms in physiological hematopoietic development.

[0012] Finally, it would be useful to have a comprehensive list of all or the majority of genes, ESTs, or nucleic acid sequences expressed in the various bone marrow stem cell populations, including HSC, MPP, CLP, and CMP. Such a list would be useful as a starting point for analyzing self-renewal and commitment, and the mechanisms associated therewith. A list of genes only expressed in HSC would be especially useful.

[0013] For the above reasons, it is desired to have a method and system for predicting lineage commitment and self-renewal. It is further desired to have a method for predicting the potential of a gene. It is further preferred to have a method for predicting the fate of a cell or gene. It is also desired to have a method for predicting the function and association of unknown genes or ESTs. In general, it is desired to understand the molecular mechanisms and genetic pathways that regulate adult stem cell development.

### SUMMARY OF THE INVENTION

[0014] The present invention relates to a method for analyzing changes in gene expression profiles of cells, wherein the cells are formed from different sub-populations of cells having different differentiation characteristics. In particular, the present invention relates to a method, whereby the activity of genes in each cell population is analyzed to determine which genes are activated and deactivated at each particular cell stage. Through this process, identification of different sets of genes that are predominantly expressed, are identified. This information is useful for predicting the potential of a gene having an unknown function. This information can also be used as part of a method designed to understand the cell fate. As such, the various gene families provide a base line for initiating studies related to understanding the molecular mechanisms and genetic pathways that are regulated in adult cell development. In particular, HSC, MPP, CLP, and CMP cells are well suited for use with the present invention. Genes include all nucleic acid sequences.

[0015] The method includes isolating a population of cells and separating the population of cells into discrete cell sub-populations. Thus, the method is initiated by dividing a cell population into sub-cell populations. For example, the stem cells that form the bone marrow hematopoietic system can be divided into HSCs, MPPs, CLPs, and CMPs. However, any cell type can be analyzed if that cell type can be divided into sub-populations having genes that are differentially expressed. The current method only requires two populations, HSCs and MPPs, for example, to determine gene association and potential, as well as cell lineage commitment.

[0016] The cell populations are separated using, preferably, cell surface marker techniques. As would be expected, stem cells of the hematopoietic system are well-suited for use in determining gene associations. The stem cells can be stained with any of a variety of immunoflourescent compositions. The compositions or reagents selected are dependent upon whether differentiated cells, which form distinct sub-populations, can be separated. As such, sub-populations may be divided based on distinct surface phenotype, immunological responses, cell cycle status, and proliferation. Other adult stem cell populations can be analyzed with the present method.

[0017] Preferably, the method is initiated by staining a population of bone marrow cells to isolate the HSCs, MPPs, CLPs, and CMPs from the bone marrow cell population, as well as the proteins and other constituents associated therewith. The preferred method uses Thy-1^{lo}c-kit⁺Sca-1^{hi}Lin^{-/lo} (KTLS) markers using fluorescence activated cell sorting (FACS). The cells can be from any species, including mammalian and insect species. KTLS markers are useful because sub-populations of bone marrow cells, such as HSCs, can be readily separated. This population of cells is further divided into 2 sub-populations: LT-HSC and MPP cells, according to their abilities to support hematopoiesis and self-renewal. These two populations of cells can be arranged in a lineage according to a progressive loss of the ability to self-renew. The LT-HSC population, representing approximately 0.005% to 0.01% of the bone marrow cells, has extensive self-renewal ability and supports long-term reconstituting ability (>6 months). MPP cells cannot self-renew but can reconstitute bone marrow for less than 4 weeks.

[0018] Further division of the sub-population may be necessary to separate populations within a sub-population. A suitable method includes the use of Rhodamine-123. Efflux of dyes, such as Rhodamine-123 (Rh), are used to separate early hematopoietic cells into HSCs and early progenitor sub-populations by flow cytometry. Rh is a mitochondria-binding fluorescent dye, and can be effluxed from the cell by the ABC transporter, P glycoprotein. LT-HSCs, which are relatively quiescent, have high ABC transporter activity, thus the population of cells that stain most weakly with this dye is highly enriched for LT-HSCs. Alternatively, MPP cells can be identified according to the expression levels of lineage-associated antigens such as Mac-1 and CD4.

[0019] The isolated population of cells has expressed nucleic acid sequences isolated from the discrete cell sub-populations. The isolated nucleic acid sequences are formed into labeled nucleic acid probes from the expressed nucleic acid sequences. The labeled nucleic acid probes are hybridized with a nucleic acid sequence library on an array, wherein identity and intensity of expression of the expressed nucleic acid sequences are identified to provide gene expression hybridization data. Any method for determining hybridization data can likely be used.

[0020] As such, after sub-populations are separated, a clonogenic library is formed. The library will contain activated genes and ESTs (nucleic acid sequences) expressed in each particular population. Probes can be formed from the library. The probes are then analyzed, where ESTs binding to certain probes indicate which genes or ESTs are activated. The hierarchical changes in gene expression profiles of highly purified, functionally homogenous populations of cells, including HSCs, MPPs, CLPs, and CMPs, are examined using an oligonucleotide array. The data provides a global assessment of early hematopoietic development and reveals a hierarchical and asymmetrical distribution of promiscuous gene expression during this process. Gene and EST expression can be visually mapped for each particular population. The gene expression hybridization data can be converted into normalized expression data, whereby change in gene expression between the discrete cell sub-populations is profiled.

[0021] The normalized data is statistically analyzed using a variety of organizational and clustering techniques. This includes using Pearson's correlation coefficient and K-means clustering. The gene expression hybridization data is converted into a graphical representation, whereby change in gene expression between the discrete cell sub-populations is profiled.

[0022] Expression of genes and ESTs in the HSCs is not just restricted to hematopoiesis-affiliated genes, but also includes genes encoding proteins with functions specified in non-hematopoietic systems, such as neuron, liver, heart, muscle, or endothelial cells. Among the hematopoiesis-affiliated genes, it was found that HSCs primarily expressed myeloid genes but expressed a limited number of lymphoid genes. MPPs express myeloid and increased number of lymphoid genes at low to medium levels, and CMPs and CLPs almost exclusively express the expected profiles of myeloid and lymphoid affiliated genes, respectively. This data clearly supports the principle that promiscuous expression of multiple non-hematopoietic, as well as hematopoietic-affiliated genes, is hierarchically regulated during the process of early hematopoietic development, and correlates with the gene's progressively restricted developmental potential.

[0023] As such, a gene or EST (specifically, nucleic acid sequences) of unknown function can be analyzed. In particular, the potential of the gene or EST can be predicted. The gene will be isolated, and expression in at least two sub-populations will be determined. Based on when the gene is expressed, it can be clustered with known genes and compared to the known mapped genes. This will predict the potential function of a gene or EST.

[0024] An unknown gene's expression intensity in each of the discrete sub-populations can be identified and compared to the unknown gene's expression pattern with known gene expression patterns in the graphical representation to associate the unknown gene with a group of known genes. This method for characterizing an unknown multilineage-affiliated gene can be summarized as profiling multilineage-affiliated gene expression in discrete cell sub-populations to provide expression data for selected genes in at least two discrete cell populations and comparing an unknown gene's expression data with the expression data.

[0025] The same method for determining an unknown gene can be used to determine cell stage commitment. This is done by comparing nucleic acid expression patterns.

[0026] A method for developing a gene expression map is practiced. Like above, this is done by isolating at least two sub-populations of cells and obtaining gene hybridization data, including gene identity data and gene expression intensity data, wherein the genes are multilineage-affiliated genes. The method includes normalizing the gene hybridization expression data to provide expression data and filtering the normalized expression data to group genes having similar expression levels. The gene hybridization expression data is converted to a graphical illustration.

[0027] An array comprising a plurality of nucleic acid sequences affixed to a substrate can be made. The nucleic acid sequences include representative clusters 1-8 and cumulative clusters 1-100. The array can also be a plurality of nucleic acid sequences affixed to a substrate, wherein the nucleic acid sequences include SEQ ID NOs. 1-4863. Individual groups of sequences SEQ ID NOs. 3428-4863, SEQ ID NOs. 1-821, SEQ ID NOs. 2076-3427, and SEQ ID NOs. 822-2075 can also be affixed to an array.

[0028] A kit for characterizing a gene of unknown function, by associating the unknown gene with genes of HSC, MPP, CMP, and CLP reference cell sub-populations, can be made. The kit includes a container and at least one nucleic acid sequence array. An activated label is also included.

[0029] The present invention further relates to families of genes and ESTs, which are expressed in the various cell populations. This family is useful for predicting cell fate, and as a tool for studying gene potential and cell commitment.

[0030] The present invention relates to a group of nucleic acid sequences for use in determining cell commitment including SEQ ID NOs. 1-4863, and separated groups, SEQ ID NOs. 3428-4863, SEQ ID NOs. 1-821, SEQ ID NOs. 2076-3427, and SEQ ID NOs. 822-2075. Gene clusters have been developed for use in analyzing cell differentiation. Clusters 1-100 are known as cumulative clusters. SEQ ID NOs. 1-4863 form the cumulative gene clusters. Another gene cluster includes representative gene clusters 1-8.

[0031] The invention relates to a population of non-hematopoiesis-affiliated genes, which include the genes listed in FIG. 3. Genes listed as upregulated in CMP and the genes listed in FIG. 4D are part of the present invention. Genes upregulated in HSC, and genes listed in FIG. 4A are part of the invention. Genes upregulated in CLP, and listed in FIG. 4C, are part of the invention. Genes upregulated in MPP, and listed in FIG. 4B, are part of the invention. A gene cluster map for use in analysis of multilineage-affiliated genes can be made. The map includes an axis related to at least two cell populations, an axis comprising normalized gene expression values, and a plot of genes clustered according to K-means clustering.

[0032] A computer system is part of the present invention and includes a processor, storage media for storing a database, and a program module, executable by the processor. The program module includes computer readable program code for effecting the steps illustrated in FIGS. 9-11.

[0033] A method for developing a gene expression map is practiced. It includes: isolating at least two sub-populations of cells, obtaining gene hybridization data, including gene identity data and gene expression intensity data, wherein the genes are multilineage-affiliated genes; and, converting the gene hybridization expression data to normalized gene expression data.

[0034] The present invention is advantageous because a family of genes and ESTs are known, which are associated with HSCs and can be used as a tool for predicting cell function. Other gene families are also developed which are associated with MPP, CLP, and CMP. The present invention is further advantageous because a method is provided for predicting gene potential and cell commitment. The present method can be used to form gene expression maps. Further, the present invention can be used to predict stem cell fate or commitment. Hypothetically, this method could be used as part of a method to control stem cell determination and development. Related to this is a family of genes expressed in HSC. As such, the present invention provides insight into the stem cell commitment and development process.

### BRIEF DESCRIPTION OF THE DRAWINGS

[0035] The application file contains at least one photograph executed in color. Copies of this patent application publication with color photographs will be provided by the Office upon request and payment of the necessary fee.

[0036] FIG. 1 shows isolation and characterization of hematopoietic stem and progenitor cells;

[0037] FIG. 1A is a schematic illustration of hematopoietic development, with the surface markers used for purifying each population of cells indicated, also, the correlation coefficient between each pair of these populations is illustrated;

[0038] FIG. 1B shows the cell cycle status of purified HSCs and MPPs using Rho123 test;

[0039] FIG. 2 shows a global view of the gene expression patterns of 4,863 genes clustered by the K-means clustering method, using Eisen's Cluster and a TreeView software (Eisen Lab, Berkeley, Calif.), with the expression levels of genes presented according to a colored gradient scale from the highest (red) to the lowest (green) representative genes for each sub-population are included

[0040] FIG. 2A is representative of HSC,

[0041] FIG. 2B is representative of MPP,

[0042] FIG. 2C is representative of CLP, and

[0043] FIG. 2D is representative of CMP;

[0044] FIG. 3 shows promiscuous gene expression of non-hematopoiesis-affiliated genes in an HSC, with a list of non-hematopoiesis-affiliated genes predominantly expressed in HSCs;

[0045] FIG. 4 shows a global view of the gene expression patterns of 4,863 genes clustered by the K-means clustering method and visualized using Eisen's Treeview software;

[0046] FIG. 4A is representative of HSC,

[0047] FIG. 4B is representative of MPP,

[0048] FIG. 4C is representative of CLP, and

[0049] FIG. 4D is representative of CMP;

[0050] FIG. 5 shows clusters of genes categorized by the expression patterns in purified stem and progenitor cells, a Spotfire® software program (Somerville, Mass.) was used to visualize the changes in expression levels of each gene during hematopoietic development, the vertical axis represents the normalized gene expression values;

[0051] FIG. 5A represents genes that are predominantly expressed in HSCs and down-regulated in MPPs, CLPs, and CMPs;

[0052] FIG. 5B represents genes that are up-regulated in MPPs;

[0053] FIG. 5C represents genes that are highly expressed in CLPs;

[0054] FIG. 5D represents genes that are highly expressed in CMPs;

[0055] FIG. 6 illustrates verification of Affymetrix® (Santa Clara, Calif.) data shown in i) using single cell RT-PCR: ii) relative expression levels of MHCII.2A, ESK, and CyclinA2 in each progenitor subset by array analyses; and, iii) results of single cell RT-PCRs for each target gene in HSCs and MPPs;

[0056] FIG. 7A shows the expression profiles of genes with known functions during hematopoietic development with changes in lineage and non-lineage-related gene expression shown;

[0057] FIG. 7B shows changes in chromatin-structure-related gene expression; and,

[0058] FIG. 7C is a schematic illustration of the correlation between promiscuous gene expression and development potential;

[0059] FIG. 8 is a gene expression map showing the up-regulation and down-regulation of gene clusters among cell sub-populations for the gene expression data in Table 4;

[0060] FIG. 9 is a flow diagram detailing a method for characterizing an unknown gene;

[0061] FIG. 10 is a flow diagram detailing a method showing how genes are clustered;

[0062] FIG. 11 is a flow diagram detailing a method showing how expression maps are formed; and,

[0063] FIG. 12 is a scattering diagram.

### SEQUENCE LISTING

[0064] The Sequence Listing, in computer readable form (CRF), is submitted on compact disc, and is hereby incorporated by reference into this patent application. A total of three compact discs are being submitted.

[0065] Compact Disc No. 1—Sequence Listing—CRF, contains a file named IP-010.5T25.txt, with 4,416 KB, which was created on Apr. 24, 2003.

[0066] Compact Discs No. 2 and 3—Sequence Listing and Table 1, containing files named IP-010.5T25.txt, with 4,416 KB, created on Apr. 24, 2003, and Table 1.txt, created Apr. 29, 2003, with 14,761 KB, and labeled Copy 1 and Copy 2.

### DESCRIPTION OF THE INVENTION

[0067] The present invention relates to a method for analyzing, determining and predicting cell differentiation and commitment, as well as gene expression patterns in a cell population having distinct sub-populations. In particular, the present invention relates to a method for developing gene expression maps, which provide a model of the up-regulation and down-regulation of genes in various cell sub-populations. The present invention relates to a method for predicting gene potential. Related to the present method are families of genes and ESTs, which are expressed in HSC, MPP, CLP, and CMP. The models demonstrate hierarchical changes in expression. More particularly, the present invention relates to a method for analyzing hematopoietic stem cell differentiation and lineage commitment. A gene expression map can be developed for each distinct cell sub-population, specifically HSCs, MPPs, CLPs, and CMPs. The map can also be developed to show gene regulation in the various sub-populations. As such, the gene expression maps can be used to predict gene function, or the particular sub-population of an unknown cell. The maps can also be used as part of a method to predict lineage commitment. Thus, the present invention relates to a method for predicting an unknown gene's function by analyzing the expression patterns of the gene, in view of the previously discussed and developed expression maps.

[0068] Any of a variety of cells may be analyzed using the present method, as long as the particular cell population can be divided into distinct cell sub-populations, wherein genes are either up-regulated or down-regulated in the distinct sub-populations as the cells develop from one population to the next. Bone marrow cells in early hematopoiesis are well-suited for analysis with the present method because they include four distinct sub-populations, LT-HSC, MPP, CLP, and CMP. The LT-HSC is the most primitive of the sub-populations and is characterized by its self-renewal capabilities. The LT-HSC either renews or evolves first into a short term (ST)-HSC, followed by differentiation into a MPP cell. MPPs have reduced self-renewal capabilities. The MPP cells then differentiate into either CMP or CLP cells. The CLPs and CMPs are the most advanced progenitors of the cell populations. As cells progress from HSC to CLP or CMP, the ability to self-renew is lost and lineage commitment occurs. The cells can be HSC, transition, and differentiated cells which include adult, embryonic, neonatal, fetal, liver, bone marrow, splenic, and lymphoid stem cells. Transition cells are those that are between HSC and differentiated cells.

[0069] Each of the sub-populations will have distinct gene expression patterns where the genes are either up or down-regulated. Thus, the genes, ESTs, or more particularly nucleic acid sequences, activated in each population are distinct and, as a group, can be distinguished from groups of genes in other sub-populations. This is important because the gene expression patterns provide clues as to how cell fate is determined. In particular, this helps to provide insight as to whether an HSC ultimately commits to HMLA, including CMP or CLP, or NHA differentiation. The gene expression patterns can also be used to predict gene potential. Collectively, this information can be used as the basis for a method for promoting a particular cell commitment. Additionally, other stem cell populations can be analyzed with the present method. Adult stem cells are well suited for analysis with the present method.

[0070] The HSCs or related cells to be analyzed can be derived from any of a variety of species, including any Animalia member, in particular, insects, mammals, or humans. Also, the cells can be derived from a variety of tissues. Preferably, the cell population used is derived from bone marrow or fetal liver tissue. The initial cell population will preferably be somatic bone marrow stem cells.

[0071] To form a gene expression map or categorize the genes, and to associate groups of genes with a particular sub-population, it is first necessary to separate the HSC population or selected cell population into the distinct sub-populations. Any of a variety of methods may be used to separate the population of cells into the distinct cell sub-populations. It is, however, important that the sub-populations be divided and separated. An available method for separating or dividing the sub-populations of a population of cells is initiated by obtaining a sufficient supply of, for example, bone marrow or fetal liver tissue cells, which will contain the various sub-populations. An amount of bone marrow or fetal liver tissue cells equal to at least 2.0×10⁴ cells should be obtained. Higher amounts may be used. The amount should be sufficient so that there is a sufficient amount of each sub-population to form a clonogenic library.

[0072] To divide the cells into sub-populations, the cells can be marked with various fluorescent materials or agents and are then separated using a flow cytometry method, which is a technology that utilizes an instrument in which particles in suspension are stained with a fluorescent dye and passed in single file through a narrow laser beam. The fluorescent signals emitted when the laser excites the dye are electronically amplified and transmitted to a computer. The computer is programmed to instruct the flow cytometer to sort the particles having specified properties into collecting vessels. In this way, the cells are divided. Flow cytometry is desirable because it is a high throughput technique that will allow for large numbers of cells to be analyzed and separated.

[0073] Flow cytometry involves the use of a fluorescence-activated cell sorter (FACS) device, which will sort the separate cell populations. These devices can be purchased from a variety of manufacturers, including Becton Dickinson Immunocytometry Systems of San Jose, Calif. As such, the devices are configured with various lasers to identify the formats or dyes.

[0074] Various fluorescent compositions can be attached to antibodies and other cell markers. It is preferred to use multiple formats or fluorescent compositions so that when cells are analyzed with the FACS sorter, various colors will indicate specificity to antibodies, or cell markers. In this way, cells can be distinguished and sorted. The available formats include, for example, fluorescein isothiocyanate (FITC), R-phycoerythrin (PE), and allophycocyonin (APC). Obviously, other compositions can be used which can be detected by a FACS device and attached to a cell marker.

[0075] It is most preferred to use a multicolor flow cytometric analysis to separate the cells. Multicolor flow cytometric analysis enables the simultaneous detection of the light-scattering characteristics (forward and side-scattered light signals) of cells, as well as their expressed levels of two or more intracellular and/or cell surface antigens that are defined by immunofluorescent staining. In this way, multicolor flow cytometric analysis enables characterization of individual cells having a variety of distinct cellular characteristics and functions. These characteristics may define a cell's activation status, lineage, subset identity, the capacity to bind cells and tissues, or migrate to sites of inflammation.

[0076] In the present method, signaling molecules that selectively adhere to the receptors on the surface of the cell are used to identify differentiated sub-populations. The signaling molecule is attached to another molecule (or the tag) that has the ability to fluoresce or emit light energy when activated by an energy source, such as an ultraviolet light or laser beam.

[0077] As such, a suspension of tagged cells (cells bound to the cell surface markers which have fluorescent tags) is sent under pressure through a very narrow nozzle—so narrow that cells must pass through one at a time. This is part of the FACS system. Upon exiting the nozzle, cells then pass, one-by-one, through the light source (laser), and then through an electric field. The fluorescent cells become negatively charged, while non-fluorescent cells become positively charged. The charge difference allows the cells to be separated from other cells. This results in a population of cells that have all of the same marker characteristics.

[0078] Surface markers are preferred for use in initially separating the cells into sub-populations. In the preferred method, the bone marrow stem cells, or selected cells, are separated by first incubating the cells with monoclonal antibodies against lineage positive markers. This will create two populations of cells: one that is Lin⁺ and the other that is Lin⁻. Lin⁺ cells are cells in which lineage commitment has resulted. Lin⁻ cells have not committed. A suitable method involves separating, the Lin⁺ cells from the Lin⁻ cells by incubation with antibody coated Dynabeads®, whereby the Lin⁺ cells will attach to the Dynabeads®, and the Lin⁻ cells will pass through. Other methods, however, can be used to separate the Lin⁻ cells.

[0079] The Lin⁻ cells are then further separated. The preferred method for isolating the Lin⁻ cells is the use of a KTLS method and kit. The cells are stained with APC conjugated c-Kit PE, conjugated Sca-1 fluorescein isothiocyanate, and Biotin/Sa-PerCPCy5.5 conjugated Thy-1. The population can then be sorted using FACS so that a population of c-kit⁺ Thy-1^{lo} Lin⁻ Sca-1⁺ cells are isolated. This is known as a KTLS population. The “+” and “−” indicate whether a cell is positive for or negative for the particular stain. As such, dependent on the desired separation, these characteristics can be selected, based on the particular cell population.

[0080] Sca-1 is a biotinylated monoclonal antibody specific for Sca-1. Lin relates to lineage markers, such as the CD family of cell surface antigens. Thy-1 is present in T-cells and is a marker. Kit also relates to cell surface antigens, such as CD117. As such, any of a variety of kits or testing protocols for staining the cells can be purchased from various providers, such as Pharmingen (San Diego, Calif.).

[0081] Stem cell markers are given short-hand names based on the molecules that bind to the stem cell surface receptors. For example, a cell that has the receptor stem cell antigen-1 on its surface, is identified as Sca-1. A stem cell antigen is a cell-surface protein on bone marrow (BM) cells, indicative of HSC. A c-Kit is a cell-surface receptor on bone marrow cell types that identifies HSC. With regard to lineage surface antigens, there are 13 to 14 different cell-surface proteins that are markers of mature blood cell lineages (Lin⁺). Detection of Lin⁻ cells assist in the purification of HSC and hematopoietic progenitor populations. Thy-1 is a cell-surface protein. Negative or low detection of Thy-1 is suggestive of HSC. As would be expected, the selected markers are dependent upon the specific cell population to be isolated.

[0082] Once the KTLS Lin⁻ cell population is isolated, it is necessary to further divide this sub-population into two distinct sub-populations. This can be accomplished using any of a variety of methods including a Rhodamine-123 method to stain the cells. Rhodamine is a mitochondrial binding fluorescent dye that is effluxed from the cell by the ABC transporter, P glycoprotein. Rhodamine-123 (R-302; FluoroPure Grade (Molecular Probes, Inc, Eugene, Oreg.), R-22420) is widely used as a structural marker for mitochondria and as an indicator of mitochondrial activity. Additionally, it is a cell-permeant, cationic, fluorescent dye that is readily sequestered by active mitochondria without inducing cytotoxic effects. Uptake and equilibration of Rhodamine-123 is rapid (a few minutes) compared to dyes such as DASPMI, which may take 30 minutes or longer. Viewed through a fluorescein long-pass optical filter, the mitochondria of cells stained by Rhodamine-123 appear yellow-green. Viewed through a tetramethylrhodamine long-pass optical filter, however, these same mitochondria appear red. A FACS sorter is again used to separate the Rh^{lo} from the Rh^{hi} cells. Rh^{lo} cells will be LT-HSCs. The Rh^{hi} cells will be MPP cells. Thus, two distinct sub-populations are separated.

[0083] The Lin⁺ cells will be separated from Dynabeads® to which antibodies were attached. The lineage positive cells, are the cells which are enriched for the Lin commitment cells. These include CLP and CMP cells. As such, these two sub-populations of cells can be isolated, initially, by separating the lineage negative from the lineage positive cells. The cells can, again, be isolated according to cell surface markers, wherein the CLPs, are of a c-kit^{lo}, sca-1^{lo}, IL-7R⁺, FcR ID and the CMP is IL-7R⁻, Sca-1⁻, c-kit⁺, CD34⁺, FcR^{lo}. The IL-7R, CD34, and FcR, are all antibodies. While the above methods are preferred, any of a variety of methods can be used to separate cell sub-populations.

[0084] After separation of the populations, gene expression and identity are determined. From each sub-population, the RNA is extracted, specifically the mRNA. As would be expected, the presence of mRNA indicates genes in the particular cell sub-population, which are being expressed. Any of a variety of methods can be used to extract the mRNA, as long as it is readily obtained, and can be used to form a clonogenic library, such as a cDNA or cRNA library. Note, that it is generally necessary to have a minimum of 50,000 cells per sub-population to obtain a linear application of mRNA, using a T7 promoter-based RNA amplification method. It is preferred to extract approximately 300 nanograms (ng) of mRNA from the isolated cell populations.

[0085] A cDNA library can be formed from the isolated mRNA of each sub-population. RNA molecules are exceptionally labile and difficult to amplify in their natural form. For this reason, the information encoded by the RNA is converted into a stable DNA duplex (cDNA) and then is inserted into a self-replicating lambda vector. Once the information is available in the form of a cDNA library, individual processed segments of the original genetic information can be isolated and examined. The cDNA library can be formed by using any of a variety of known methods and kits, including the ZAP expression cDNA synthesis kit, manufactured by Stratagene (LaJolla, Calif.). The cDNA will be synthesized by reverse transcription using a superscript and then by DNA synthesis using Klenow DNA polymerase, for example. These products can be purchased from Invitrogen® (Carlsbad, Calif.) or Stratagene®, for example. As would be expected, any of a variety of methods can be used to form the clonogenic library.

[0086] The cDNA library can be amplified by cloning it into any of a variety of expression vectors, with the amount of cDNA isolated from the vectors sufficient to produce a cDNA library. After extraction of the mRNA, it is necessary to form a clonogenic library. The cRNA library is synthesized in vitro from a linearized cDNA template using T7 RNA polymerase in the presence of the cap analogue 7 mGpppG. Resultingly, four clonogenic libraries, which are related to gene expression are isolated and developed.

[0087] The clonogenic libraries, preferably four, are then analyzed with a bioinformatics program, which will detect expression levels of the genes in each sub-population. In particular, specific genes expressed in each population will be isolated. Specifically, each cDNA or cRNA library will be hybridized with known arrays. A preferred array is an MG-U74 oligonucleotide array. This is manufactured by Affymetrix® Gene Chip Company.

[0088] Base-pairing (i.e., A-T and G-C for DNA; A-U and G-C for RNA), or hybridization, is the underlining principle of the DNA or oligonucleotide microarray. An array is an orderly arrangement of samples. It provides a medium for matching known and unknown DNA or RNA samples based on base-pairing rules and automating the process of identifying the unknowns. An array experiment can make use of common assay systems, such as microplates or standard blotting membranes, with samples deposited on them either manually or by utilizing robotics. In general, arrays are described as macroarrays or microarrays, the difference between them being the size of the sample spots. Macroarrays contain sample spot sizes of about 300 microns or larger and can be easily imaged by existing gel and blot scanners. The sample spot sizes in microarray are typically less than 200 microns in diameter, and these arrays usually contain thousands of spots. Microarrays require specialized robotics and imaging equipment.

[0089] DNA microarray, or DNA chips, are fabricated by high-speed robotics, generally on glass but, sometimes, on nylon substrates, for which probes with known identity are used to determine complementary binding, thus allowing massively parallel gene expression and gene discovery studies. An experiment with a single DNA chip can provide information on thousands of genes simultaneously. Generally, a “probe” is the tethered nucleic acid with known sequence, whereas a “target” is the free nucleic acid sample whose identity/abundance is being detected.

[0090] There are two major application forms for the DNA microarray technology: 1) identification of sequence (gene/gene mutation); and 2) determination of expression level (abundance) of genes. In the present method, it is preferred to identify expressed sequences and the expression level.

[0091] There are two variants of the DNA microarray technology, in terms of the property of arrayed DNA sequence with known identity. In Format 1, a cDNA (500˜5,000 bases long) is immobilized to a solid surface, such as glass, using robot spotting and exposed to a set of targets, either separately or in a mixture. The second option involves an array of oligonucleotide (20˜80-mer oligos) or peptide nucleic acid (PNA) probes which are synthesized either in situ (on-chip) or by conventional synthesis, followed by on-chip immobilization. The array is exposed to labeled sample DNA, hybridized, and the identity/abundance of complementary sequences are determined. Many companies manufacture oligonucleotide-based chips using alternative in-situ synthesis or depositioning technologies.

[0092] Analysis software, provided by Affymetrix, for example, can convert the raw hybridization intensities into expression level measurements (“average difference” in Affymetrix terms) for each gene or nucleic acid sequences. The expression levels are based on a comparison between the hybridization signals of a perfect match (PM) and a mismatch (MM). Negative values are obtained, if the MM value was higher than the PM value, making it difficult to compare the expression patterns between two or more conditions when one of the conditions was a negative value. Therefore, all negative values can be converted to a positive 20, using 20 as the background level. This data conversion method is used to permit estimation of the number of genes expressed in each sub-population of cells. A gene is defined to be “expressed” when the expression level of that gene is determined to be greater than 100. Expression level is measured by the affinity of binding of cRNA sequences derived from expressed genes to a group of select representative oligonucleotides on the gene chip. Alternatively, gene expression level is measured by binding of multiple copies of labeled cRNA binding to the array.

[0093] The genes in the microarray data are considered as differentially expressed and can be subsequently screened for clustering analysis. Preferably, the genes are filtered based upon a certain expression level. Genes which are not sufficiently expressed, are eliminated from the analysis. Preferably, the genes are analyzed with a gene filter of the following parameters: |yⱼ₍ₘ₎−yⱼ₍ₗ₎|>100 and yⱼ₍ₘ₎/yⱼ₍ₗ₎>2 for j=1, . . . ,n, where yⱼ₍ₘ₎ and yⱼ₍ₗ₎ are the order statistics with yⱼ₍ₗ₎≦ . . . ≦yⱼ₍ₘ₎ for the j^{th} gene. This filtering criterion considers either simultaneously or sequentially the absolute difference (>100) of the gene expression levels and the fold change (>2-fold) of the expression levels for each gene (>100). Thus, 4,863 genes were selected for clustering analysis, including 137 initial seeds.

[0094] There are multiple ways to interpret the data. Any of a variety of clustering and hierarchial measurements can be used. To understand the pair-wise relationship between each population of cells in terms of the gene expression intensity and diversity, Pearson's Correlation Coefficient can be calculated. The Pearson's formula is applied to the raw expression level data. The lineage relationship is reflected by the correlation coefficient (r), between HSCs (defined as subscript 1) and MPPs (defined as subscript 2), CLPs and CMPs (defined as subscripts 3 and 4), is r₁₂=0.951 (FIG. 1a), indicating a significant positive linear correlation between the gene expression intensity and a measure of gene diversity between HSCs and MPPs. Similar calculations yielded r₁₃=0.900, r₁₄=0.866, r₂₃=0.935, r₂₄=0.930, and r₃₄=0.934, indicating linear correlation of gene expression intensity and gene diversity measurements between HSCs vs. CLPs, HSCs vs. CMPs, MPPs vs. CLPs, MPPs vs. CMPs, and CLPs vs. CMPs, respectively. The numerical Pearson's correlation values reflect the physiological hierarchical relationship among these purified populations, as shown in FIG. 1a.

[0095] Pearson's Correlation Coefficient is explained as follows: yⱼₖ represents the expression level of the j^{th} gene in k^{th} sample, here k=1, . . . m, and j=1, . . . ,n, with m=4, and n=24,000 in sample data. Let k=1 correspond to the sample gene expression observed in LT-HSC, k=2 in MPP, k=3 in CLP, and k=4 in CMP. The Pearson's Correlation Coefficient between any two samples is given by the following equations:

[0096] for i≠k, and 1≦i,k≦m,

[0097] where

$${\overline{y}}_{k} = {\sum }_{j = 1}^{n} {y}_{jk} / n , and {s}_{k} = \sqrt{{\sum }_{j = 1}^{n} {( {y}_{jk} - {\overline{y}}_{k} )}^{2} / ( n - 1 )}$$

[0098] are the mean and standard deviation of the k^{th} sample, respectively. As an expression level below 20 may not be confidently measured (3 Tamayo), a threshold value of 20 is assigned to an expression level that is below 20.

[0099] The closer the resultant coefficient is to a value of one, the more significant the correlation. The calculation showed that the distance between HSC and MPP is r₁₂=0.950 (see FIG. 1A), indicating a very high positive linear correlation between the expression levels in LT-HSC and MPP. This numerical score indicated that highly expressed genes in LT-HSC tended to have large overall intensities in MPP. Moreover, this result indicated that the LT-HSC and MPP sub-populations are similar in their gene intensity patterns. Similar calculations yielded the following data: r₁₃=0.900, r₁₄=0.866, r₂₃=0.937, r₂₄=0.933, and r₃₄=0.936 (see FIG. 1A), which indicated linear correlations between gene expressions in LT-HSC and CLP, LT-HSC and CMP, MPP and CLP, MPP and CMP, and CLP and CMP, respectively.

[0100] These numerical measures of correlation matched with known biological situations of the hierarchical sequential of HSC proliferation and differentiation. MPP falls into a pivotal population downstream of LT-HSCs and upstream of either CLP or CMP within a relatively close distance to HSCs (0.950) and almost equal distances to either CLP or CMP (0.937, 0.933). The developmental distance between MPP and CLP or CMP is similar to that between CLP and CMP (0.936).

[0101] In summary, the Pearson's calculations established a lineage relationship between the various cell sub-populations. The lineage relationship was reflected by the correlation coefficients. The Pearson's computation quantified a physiological hierarchical relationship among the cell sub-populations. Thus, these results illustrate differential gene expression across the four hematopoietic sub-populations characterized. As such, genes associated with these sub-populations can be grouped and analyzed.

[0102] Once the hybridization data is collected, the expression patterns need to be analyzed. Genes with similar expression behavior (up-regulation or down-regulation under a similar condition) are likely to be related functionally, so that the relative expression patterns among genes in a targeted population of cells are compared. To analyze the patterns of gene expression, a variety of clustering methods can be used, including self-organization maps, hierarchical clustering, and K-means cluster. K-means is the most preferred.

[0103] The K-means clustering method gathers genes into groups according to similarity of expression patterns among target populations. In particular, it allows for the selection of initial seeds according to known features (genes with known biological functions); then the genes are grouped around selected seeds by K-means clustering. According to known important roles played in hematopoiesis, 137 genes were selected as the initial seeds. Genes that passed the initial screening filter (1, with absolute expression level >100 in at least one condition; 2, with >2 fold changes between at least two conditions) were used for further analysis.

[0104] The K-means clustering method groups items together according to the similarity of the items. The similarity/dissimilarity of the ith and jth genes are given by the Euclidean distance between the two observations:

$${r}_{ik} = \frac{{\sum }_{j = 1}^{n} ( {y}_{ji} - {\overline{y}}_{i} ) ( {y}_{jk} - {\overline{y}}_{k} )}{( n - 1 ) {s}_{i} {s}_{k}} ,$$

[0105] for i≠k, and 1≦i,k≦m,

[0106] where

$${\overline{y}}_{k} = {\sum }_{j = 1}^{n} {y}_{jk} / n , and {s}_{k} = \sqrt{{\sum }_{j = 1}^{n} {( {y}_{jk} - {\overline{y}}_{k} )}^{2} / ( n - 1 )}$$

[0107] are the mean and standard deviation of the k^{th} sample, respectively.

[0108] This method is designed to group observations into a collection of K clusters. The value of K can be determined either in advance or as a part of the clustering procedure. As such, the clustered genes can form a map for use in analyzing expression.

[0109] After gathering the hybridization signal intensity data, it can then be analyzed using imaging processing software by Eison. Alternatively, software developed by Spotfire® may be used. This provides an illustration of when a gene is up-regulated and down-regulated from one sub-population to another. As such, a clear method, or illustration, is provided, which shows and correlates gene expression to lineage development. In particular, a map is developed for each sub-population, with the map illustrating all genes expressed in the particular sub-population. This data can be combined to illustrate gene up-regulation and down-regulation from one population to the next. As such, a couple of different types of maps are provided for comparison purposes. One map is a grouping of all genes that are up-regulated in a particular sub-population. The other is an illustration of how the genes are turned on and off.

[0110] The potential for unknown genes, can be predicted possibly by comparing the gene to the maps mentioned herein. Conversely, this can be done by comparing data. The gene can be analyzed in all four sub-populations to determine when it is and is not expressed. Expression levels of the gene will then be compared to expression levels of known genes. Depending upon when the gene is up-regulated and down-regulated, this will allow for the prediction of the gene's potential function by comparing it with known genes and their functions. As such, the expression patterns of the gene will associate it with other known genes.

[0111] Further, a cell, in particular, a bone marrow cell, can be isolated, and the lineage commitment of such cell can be determined. This is done by comparing the genes, which are up-regulated in such cell, with expression patterns of known cells.

[0112] Isolated groups of genes are also related to the present invention. Related to the present invention are families of genes and ESTs. The isolated groups will be those genes that are up-regulated or down-regulated during or in a particular cell sub-population. As such, there are gene maps for HSC (SEQ ID NOs 3428-4863), MPP (SEQ ID NOs 2076-3427), CLP (SEQ ID NOs 1-821), and CMP (SEQ ID NOs 822-2075).

[0113] Table 1, which discloses the above genes, is submitted on compact disc (3 copies), is incorporated by reference into this patent application.

[0114] Thus, hematopoietic stem cells (HSCs) have self-renewal capacity and multilineage developmental potentials. HSC development progresses from quiescent long-term HSCs to proliferative multipotent progenitor, and to differentiating common lymphoid/myeloid progenitors. The molecular mechanisms that determine the pluripotent potential, and early lineage commitment of HSCs, remain largely unknown. Using Affymetrix® MG-U74 A and B chips representing 24,000 genes and ESTs, changes in the gene expression profiles are illustrated from developmental progression to adult murine HSCs (SEQ ID NOs. 3428-4863). It was observed that a promiscuous expression of non-hematopoietic-affiliated and hematopoietic multilineage-affiliated genes in HSCs occurred. During the progression of HSC proliferation and differentiation, the gene expression profile becomes less promiscuous and this correlated with a progressively reduced developmental potential. This observation implied that hematopoietic stem cell pluripotent potential is determined by its multi-program accessibility. As such, a method is provided for genome-wide expression profiling.

[0115] This investigation will tell us what it is about these genes and proteins that determines the type of cells they become such as T and B lymphocytes, erythrocytes, monocytes, megakaryocytes, and granulocytes, what causes cells to undergo self-renewal, expansion, or maturation, and how cells migrate to different parts of the body.

[0116] A gene matrix can be constructed by adhering and affixing the isolated genes and expressed sequence tag (EST) cluster nucleic acid sequences from the cell sub-populations in a particular tissue lineage pathway onto a solid phase matrix or support. Suitable multilineage cell tissue can include, but are not limited to hematopoietic, nerve, muscle, kidney, and liver. The Affymetrix.RTM.417.TM. Arrayer and 427.TM. Arrayer can be used to deposit densely packed nucleic acid arrays on glass slide matrixes. Suitable solid phase matrices that can be used are silica or silica-based materials, inorganic glass, functionalized glass, polymers, plastics, resins, polysaccharides, carbon, metals, polymerized Langmuir Blodgett film, Si, Ge, GaAs, GaP, SiO₂, SiN₄, polytetrafluoroethylene, polyvinylidenedifluoride, polystyrene, polycarbonate, or combinations thereof.

[0117] The nucleic acid sequences are placed in contact with the slide, washed, and dried for use in assays. In this manner, separate gene arrays for each cell sub-population in a multilineage differentiation pathway can be created for subsequent characterization of sub-populations. Alternatively, the gene arrays for all sub-populations of cells associated with a multilineage pathway can be placed on the same slide matrix. Affymetrix GeneChip MU-U74 (version 2-arrays A and B (Affymetrix, Santa Clara, Calif.) also can be used.

[0118] A nucleic acid library on a solid phase matrix or support can be used. Specifically, a separate glass solid phase matrix can be constructed containing a library of nucleic acid sequences associated with HSC, MPP, CMP, or CLP genes.

[0119] Solid phase matrices can also be constructed that include nucleic acid sequences associated with a combination of hematopoietic cell sub-populations. A fifth glass matrix can be prepared that contains HSC and MPP sequences selected from a group consisting of SEQ. ID. NO. 2076-4863. A sixth glass matrix can be prepared that contains MPP and CMP sequences selected from a group consisting of SEQ. ID. NOs. 822-3427. An seventh glass slide can be made that contains MPP and CLP sequences selected from a group consisting of SEQ. ID. NOs. 1-821 and 2076-3427. A eighth glass slide can be prepared that contains HSC, MPP, CMP, and CLP sequences selected from a group consisting of SEQ. ID. NO. 1-4863.

[0120] A hematopoictic cell differentiation test kit can be constructed that includes the following components: a container, a hematopoietic cell microarray or an Affymetrix GeneChip MU-U74 Array A and B; a 96-well microtiter plate array of 0.2 ml microamp tubes; fluorescence-labeled (e.g., fluorescein, rhodamine) monoclonal antibodies to HSC, MPP, CMP, and CLP markers (e.g., Thy-1, Sca-1, Lin); four sets of Dynabead packed affinity columns for purification of HSC, MPP, CMP, and CLP cells, respectively; biotinylated RNA probe positive control standards which specifically bind to HSC, MPP, CMP, and CLP regions on the arrays; preserved HSC, MPP, CMP, and CLP control cell lysates; gene specific primers for at least four genes corresponding to each four sub-populations of cells for RT-RNA replication, R-phycoerythrin-conjugated streptavidin; antisense biotinylated control cRNA (bioB, bioC, bioD, and cre); a HPRT RNA transcript positive control for RT-PCR reactions, biotin-N-hydroxysuccinimide ester; biotinylated-cRNA controls for HSC, MPP, CMP, and CLP sub-populations, Qiagen RNAeasy columns, lysis buffer containing 0.5% Triton X-100, ethidium bromide stain for electrophoresis, reference gene expression maps for HSC, MPP, CMP, CLP sub-populations and transition cells; and computer software for data analysis.

[0121] The kit's included computer software can perform the following functions: conversion of raw hybridization intensity data into gene expression levels based on computation between hybridization signals of perfect match and mismatch pairs; conversion of negative values to positive values; computation of “expressed” gene numbers, based on establishment of a minimum expression level; Pearson correlation coefficient computation for gene distance similarities and differences; prescreening and selection of genes using a screening filter for subsequent clustering analysis; normalization of gene expression level standard deviation results; K-means gene clustering for grouping of cumulative clusters 1-100 of Table 3 and representative clusters 1-8 of Table 4; conversion of normalized gene expression standard deviation results to graphical representation, and color fingerprinting among cell sub-population categories utilizing Spotfire visualization of gene expression map fingerprint patterns.

[0122] The kit user will provide a FACS sorter or micro-manipulator for separation and purification of hematopoietic cells and deposition into tubes of 96 well plate arrays; hematopoictic cells to be characterized; fluorescence detection instrumentation; Dulbecco's MEM or RPMI-1640 culture media; HEPES, cell buffers; micro-pipettors and tips; electrophoresis apparatus; and agarose gels.

[0123] The foregoing test kit can be used in characterization of both unknown hematopoietic genes and unknown cells along the HSC to MPP to CMP/CLP differentiation pathways. Briefly, bone marrow, spleen, liver, lymph node, or other hematopoietic stem cell sources are separated by FACS sorting or Dynabead affinity column separation into HSC, MPP, CMP, and CLP sub-populations of interest. Upon separation, isolated cells from a specific sub-population (e.g., HSC-MPP transition cells) are placed individually in a 96 well microtiter plate array using either FACS instrument sorting or micromanipulation. The HSC-MPP transition cells are lysed in cell lysis buffer, and subjected to first and second round PCR amplification to obtain amplified cRNA copies of HSC and MPP genes of interest utilizing gene-specific forward and reverse primers. Lysates containing PCR amplified c-RNA copies of HSC, MPP, CMP, and CLP genes respectively can be included in parallel with the HSC-MPP transition cell lysates as positive controls.

[0124] The amplified cRNA from replicate wells derived from the HSC-MPP transition cell and the four sub-population control cells can be biotinylated with the biotin-NHS ester and mixed with antisense biotinylated control cRNA. Then the biotinylated-specific cRNA and/or the antisense control cRNA for each respective sub-population is hybridized with the nucleic acid sequences on the microarray or the Affymetrix GeneChip. Strepavidin-conjugated phycoerythrin is added to enable detection of the gene expression level for each corresponding gene on the HSC and MPP gene expression map. The reference gene expression map is created by use of the kit's software, as provided in Example 27. Characterization of the expression pattern of a plurality of genes (e.g., at least 5 genes) from the HSC-MPP transition cell will yield a gene expression fingerprint map that may include characteristics of the HSC positive control cell and the MPP positive control reference cell genes. The gene expression fingerprint map characterizing the HSC-MPP transition cell can be compared with the reference gene expression fingerprint maps obtained from both (1) the reference HSC and MPP sub-population cell lysates included in the aforementioned biotinylation procedure, and (2) the kit's biotinylated cRNA control reagents provided for corresponding reference HSC and MPP cell sub-populations. In addition, the HSC-MPP transition cell gene expression map may be compared against the kit's included printed version of the reference HSC, MPP, CMP, CLP, and transition cell gene expression maps.

[0125] In this manner, both the isolated individual HSC-MPP transition genes and transition cells that express these genes can be characterized and identified. Similarly, isolated individual MPP to CMP transition genes and cells, as well as MPP to CLP transition genes and cells, can be characterized and identified. Moreover, individual cells within the HSC, MPP, CMP, and CLP sub-population categories may be further characterized.

[0126] For characterization of a particular unknown HSC-MPP transition gene, amplified cRNA from the isolated HSC-MPP cell can be obtained and biotinylated. This is mixed with antisense biotinylated control cRNA and hybridized with nucleic acid sequences on the microarray. Strepavidin-conjugated phycoerythrin is added, and a light source excites fluorescence photon emission from the phycoerythrin label. The instrument's detector collects the emitted light photon signal and the instrument's software converts the raw photon data into gene expression intensity signal data. The instrument's software can further convert the unknown gene expression intensity signal data to normalized gene expression data expressed as a numerical standard deviation (s.d.) value. The software then compares the unknown gene expression numerical s.d. value for the same gene's expression numerical s.d. value in the control reference HSC, MPP, CMP, CLP, and transition cell sub-populations. Based upon the unknown gene's expression numerical s.d. value software then determines similarities or differences in comparison with the control reference cell values to characterize and identify the unknown gene. Moreover, when this gene characterization procedure is executed for a plurality of genes obtained from several HSC-MPP transition cells, the kit's software can be utilized to obtain groupings of gene clusters that characterize and identify a particular HSC-MPP transition cell sub-population.

[0127] For characterization of an isolated unknown transition cell, the above procedure can be followed for each individual gene. In this manner, an unknown transition cell's gene expression map may be constructed for a plurality of individual genes. As described previously, this unknown cell's gene expression map can be compared with the reference gene expression maps for known reference HSC, MPP, CMP, CLP, and transition cell sub-populations. Based upon these map comparisons, the unknown transition cell can then be characterized and identified.

### EXAMPLES

### Example 1

[0128] To determine expression patterns of genes and how a cell commits to a specific lineage, it was necessary to separate differentiated sub-populations of cells. In particular, a method was practiced, which separated sub-populations of bone marrow stem cells, whereby LT-HSCs, MPP, CLP, and CMP populations were separated.

[0129] 4.7×10⁹ bone marrow cells were collected from the femurs and tibias of 60 C57B6-J mice (6-8 weeks old). These bone marrow cells were incubated with rat monoclonal antibodies against lineage-positive cell surface markers (Pharmingen) including CD34, IL-7R, Fcγ RII/III, and CD2. Lineage negative (Lin^{-/lo}) cells were enriched by twice depleting lineage-positive cells through incubation with antibody-coated (sheep antirat IgG) Dynabeads® M-450 (Dynal Biotech, Oslo, Norway). This created two populations of cells, lineage positive (Lin⁺) and lineage negative (Lin⁻).

[0130] The Lin^{-/lo} cells were stained with Sca-1 fluorescein isothiocyanate (FITC) APC-c-Kit PE conjugated Sca-1, and Biotin/Sa-PerCPCy5.5 conjugated Thy-1. The KTLS cell population was sorted as c-kit⁺, Sca-1⁺, and Thy-1^{lo} using FACS. The printout of the data is shown in FIG. 1a. Thy-1⁻ was defined by isoform IgG2bκ and the Thy-1^{hi} population could be seen when the R1 gate, shown in FIG. 12, was moved to the Sca-1⁻ position.

[0131] Thus, the mouse hematopoietic stem cells (HSCs) were isolated with c-kit⁺Thy-1^{lo}Lin^{-/lo}Sca-1^{hi} (KTLS) markers using fluorescence activated cell sorting (FACS). The HSCs represent about 0.05% of mouse bone marrow cells and these cells can fully reconstitute all blood cell elements. The population of cells isolated with KTLS was heterogeneous and contained three subpopulations: LT-HSCs, ST-HSCs, and MPP. The LT-HSC sub-population supports long-term reconstituting ability (>6 months); ST-HSCs briefly contribute to hematopoiesis (6-8 weeks); and MPP cells reconstitute bone marrow for less than 4 weeks. Thus, sub-populations of stem cells were isolated using cell surface markers.

### Example 2

[0132] The Lin⁺ cells of Example 1 were necessarily separated from Lin⁻ because lineage commitment had already occurred. CLP and CMP are the first differentiation branches of cell lineage commitment from MPP. Approximately 80,000 cells of each of the CLP (c-kit^{lo}, Sca-1^{lo}, IL-7R⁺) and CMP (IL-7R⁻, Sca-1⁻, c-kit⁺, CD34⁺, FcR^{lo}) were isolated following previously reported FACS procedures and using a FACS sorter. Thus, a second group of cells were isolated using cell surface markers.

### Example 3

[0133] A second process was performed to separate the sub-populations of HSCs that were previously isolated in Example 1. Rhodamine-123 (Rh) was used to separate the KTLS cells of Example 1 into LT-HSC and early progenitor sub-populations by flow cytometry. Rh is a mitochondria-binding fluorescent dye, and can be effluxed from the cell by the ABC transporter, P glycoprotein. LT-HSCs, which are relatively quiescent, have high ABC transporter activity; thus, the population of cells that stain most weakly (Rh^{lo}) with this dye are highly enriched for LT-HSCs. In contrast, intermediate (Rh^{itm}) and highest (Rh^{hi}) staining of Rh, relate to two populations of cells that are enriched with ST-HSCs and MPP cells. Using Rh staining, the KTLS cells were separated into Rh^{lo} and Rh^{hi}, populations, as illustrated in FIG. 1B. In order to avoid a potential interference from the intermediate staining of Rh (Rh^{itm}) cells which were enriched with ST-HSCs, a symmetrical portion of cells containing either the 15% highest staining or the 15% lowest staining for Rh was chosen. The 80,000 cells representing LT-HSCs and MPP isolated using this protocol represent 0.002% of the total nucleated bone marrow cells obtained from the 60 C57B-6J mice, of Example 1.

[0134] Thus, a variety of different known methods were used to isolate various HSC sub-populations. In particular, incubation with monoclonal antibodies directed against lineage positive members was used, followed by a KTLS method. The KTLS cells were further isolated using Rh staining. In this way, populations of LT-HSC, MPP, CLP, and CMP cells were separated.

### Example 4

[0135] A competitive repopulation assay to confirm the functional differences between the Rh^{lo} and Rh^{hi} populations of cells was performed. The result demonstrated that the engraftment rate using Rh^{lo} cells was much higher than that using Rh^{hi} cells post-transplantation. In addition, the Rh^{lo} cells could support hematopoiesis for up to 6 months post-transplantation and were able to reconstitute the bone marrow in a secondary transplantation. The Rh^{hi} cells, which gave rise to both myeloid and lymphoid lineages, engrafted the bone marrow for less than 4 weeks. This result demonstrated that the two sorted cell populations were distinct: the Rh^{lo} population of cells was enriched for LT-HSCs and the Rh^{hi} population of cells was enriched for MPP.

[0136] Although the competitive re-population assay demonstrated that Rh^{lo} and Rh^{hi} KTLS cells were functionally distinct, the cell cycle states remained uncharacterized. Rh^{lo} KTLS has been known to be enriched with cells that are in a relatively arrested or quiescent state. In contrast, Rh^{hi} KTLS are enriched cells that are actively cycling. To confirm this observation, the Rh^{lo} and Rh^{hi} KTLS cells were stained together with Hoechst 33324 dye. The flow result shows that the Rh^{lo} KTLS population of cells was enriched with cells that were in the G0/G1 phase (98%); in contrast, only 70% Rh^{hi} KTLS population of cells were in G1 phase; and the rest were in the S/G2/M phases (FIG. 1B). These sorted Rh^{lo} and Rh^{hi} KTLS populations most likely reflect the developmental stages of HSCs, with Rh^{lo} KTLS representing the LT-HSCs that were relatively quiescent and were in the self-renewal compartment. The Rh^{hi} KTLS represent MPP cells that were highly proliferative and in the expansion compartment.

### Example 5

[0137] Total RNA was extracted from 8×10⁴, from each of the four purified sub-populations of the previous Examples by the Trizol method. A minimum of 50,000 cells is required to obtain a linear amplification of RNA using T-7 promoter based RNA amplification. The amount of RNA was measured using Microplate SpectraMax® (Molecular Devices Corp., Sunnyvale, Calif.). Approximately 300 ng of total RNA was obtained from each cell population.

[0138] cDNA and the corresponding cRNA were synthesized following the manufacturer's procedure. A cDNA library, known as “A” was constructed from 1.3×10⁶ cells using the ZAP expression cDNA synthesis kit following the manufacturer's procedure (Stratagene). Briefly, total RNA was isolated from the sub-population of cells using Trizol Reagent (BRL). The cDNA was synthesized first by reverse transcription using Superscript II (Invitrogen) and then by DNA synthesis using Klenow DNA polymerase (Invitrogen). The cDNA inserts were cut with EcoRI and XhoI restriction enzymes and cloned into the EcoRI/XhoI sites of λZAPExp vector. The plasmids (pBK; Strategene, LaJolla, Calif.) bearing the cDNA inserts were excised from their parent vector λZAPExp using helper phage according to the manufacturer's protocol. The primary cDNA library A contained 36,000 clones. cDNA libraries were made therefrom. cRNA was purified using Qiagen RNeasy Columns (Qiagen® Valencia, Calif.), and fragmented to sizes of 35-200 bases. cDNA libraries were made for each sub-population of cells.

### Example 6

[0139] Analysis of gene expression was conducted using the clonogenic libraries formed from the isolated cell sub-population discussed in Example 5. The gene expression in the HSCs, MPPs, CLPs, and CMPs was measured by using MG-U74 set oligonucleotide arrays A and B. The Affymetrix® GeneChip MU-U74 (Version 2) arrays A and B (Affymetrix®) cover approximately 6,000 murine known genes, and 18,818 EST Unigene cluster sequences. Equal amounts (5 μg) biotinylated-labeled cRNA derived from each population of cells were mixed with anti-sense biotinylated control cRNA (bioB, bioC, bioD, and cre) and were then individually hybridized with Chips A and B. The chips were then washed, stained, scanned, and normalized (enabling comparisons of data between chips) following the standard procedure (Affymetrix®). As such, gene expression was identified and the gene expression intensity was measured.

[0140] A replicate result of the hybridization data for isolated HSC and MPP cell sub-populations from two independent experiments, wherein each well reproduced and demonstrated similar expression patterns. The average of these two results were used for data analysis. Due to the extremely limited numbers of CLPs in murine bone marrow, only one set of hybridization data for CLP and CMP was obtained.

[0141] Streptavidin (SA) (a biotin binding protein)-conjugated PE was used to detect the hybridization signal intensity. Replicate hybridization results for HSCs and MPP from two independent experiments were obtained. Light emission signals were collected by a detector, and signal intensities were computed that quantified the binding of PE-SA-label to biotinylated cRNA probes hybridized with nucleic acid sequences on the array. These signal intensities were used to determine gene expression intensity and gene diversity. Average signal intensity values were derived for both HSC and MPP cell sub-populations. Thus, raw data on gene expression identity was obtained. Further, data on the intensity of expression was obtained.

### Example 7

[0142] Analysis software, provided by Affymetrix, converted the raw hybridization intensities into expression level measurements (“average difference” in Affymetrix terms) for each gene or nucleic acid sequences. The expression levels were based on a comparison between the hybridization signals of a perfect match (PM) and a mismatch (MM). Negative values were obtained if the MM value was higher than the PM value, making it difficult to compare the expression patterns between two or more conditions when one of the conditions was a negative value. Therefore, all negative values were converted to a positive 20, using 20 as the background level. This data conversion method was used to permit estimation of the number of genes expressed in each sub-population of cells. A gene was defined to be “expressed” when the expression level of that gene was determined to be greater than 100. Expression level was measured by the affinity of binding of cRNA sequences derived from expressed genes to a group of select representative oligonucleotides on the gene chip. Alternatively, gene expression level was measured by binding of multiple copies of labeled cRNA binding to the array.

### Example 8

[0143] Using a scattering plot (FIG. 12), gene expression intensity and diversity among the 4 sub-populations of cells, LT-HSCs, MPP, CLP, and CMP (FIGS. 2, 3, and 4), were compared. The signal intensity derived from LT-HSCs was used as the reference point. As FIGS. 2, 3, and 4 show, the diversity of gene expression in each population of cells provided a global view of the gene expression changes. These expression changes reflected the stepwise progression from LT-HSC to MPP and then from MPP to either CLP or CMP, and are consistent with the illustrations in FIG. 1A and FIG. 8.

### Example 9

[0144] To understand the pair-wise relationship between each population of cells in terms of the gene expression intensity and diversity, Pearson's Correlation Coefficient was calculated. The Pearson's formula was applied to the raw expression level data of Example 7. The lineage relationship, reflected by the correlation coefficient (r), between HSCs (defined as subscript 1) and MPPs (defined as subscript 2), CLPs and CMPs (defined as subscripts 3 and 4), is r₁₂=0.951 (FIG. 1a), indicating a significant positive linear correlation between the gene expression intensity and a measure of gene diversity between HSCs and MPPs. Similar calculations yielded r₁₃=0.900, r₁₄=0.866, r₂₃=0.935, r₂₄=0.930, and r₃₄=0.934, indicating linear correlation of gene expression intensity and gene diversity measurements between HSCs vs. CLPs, HSCs vs. CMPs, MPPs vs. CLPs, MPPs vs. CMPs, and CLPs vs. CMPs, respectively. The numerical Pearson's correlation values reflect the physiological hierarchical relationship among these purified populations, as shown in FIG. 1A.

[0145] Pearson's Correlation Coefficient is explained as follows: yⱼₖ represents the expression level of the j^{th} gene in k^{th} sample, here k=1, . . . m, and j=1, . . . ,n, with m=4, and n=24,000 in sample data. Let k=1 correspond to the sample gene expression observed in LT-HSC, k=2 in MPP, k=3 in CLP, and k=4 in CMP. The Pearson's Correlation Coefficient between any two samples is given by the following equations:

$${r}_{ik} = \frac{{\sum }_{j = 1}^{n} ( {y}_{ji} - {\overline{y}}_{i} ) ( {y}_{jk} - {\overline{y}}_{k} )}{( n - 1 ) {s}_{i} {s}_{k}} ,$$

[0146] for i≠k, and 1≦i, k≦m,

[0147] where

$${\overline{y}}_{k} = {\sum }_{j = 1}^{n} {y}_{jk} / n , and {s}_{k} = \sqrt{{\sum }_{j = 1}^{n} {( {y}_{jk} - {\overline{y}}_{k} )}^{2} / ( n - 1 )}$$

[0148] are the mean and standard deviation of the k^{th} sample, respectively. As an expression level below 20 may not be confidently measured (3 Tamayo), a threshold value of 20 is assigned to an expression level that is below 20.

[0149] The closer the resultant coefficient is to a value of one, the more significant the correlation. The calculation showed that the distance between HSC and MPP is r₁₂=0.950 (see FIG. 1A), indicating a very high positive linear correlation between the expression levels in LT-HSC and MPP. This numerical score indicated that highly expressed genes in LT-HSC tended to have large overall intensities in MPP. Moreover, this result indicated that the LT-HSC and MPP sub-populations are similar in their gene intensity patterns. Similar calculations yielded the following data: r₁₃=0.900, r₁₄=0.866, r₂₃=0.937, r₂₄=0.933, and r₃₄=0.936 (see FIG. 1A), which indicated linear correlations between gene expressions in LT-HSC and CLP, LT-HSC and CMP, MPP and CLP, MPP and CMP, and CLP and CMP, respectively.

[0150] These numerical measures of correlation matched with known biological situations of the hierarchical sequential of HSC proliferation and differentiation. MPP falls into a pivotal population downstream of LT-HSCs and upstream of either CLP or CMP within a relatively close distance to HSCs (0.950) and almost equal distances to either CLP or CMP (0.937, 0.933). The developmental distance between MPP and CLP or CMP is similar to that between CLP and CMP (0.936).

[0151] In summary, the Pearson's calculations established a lineage relationship between the various cell sub-populations. The lineage relationship was reflected by the correlation coefficients. The Pearson's computation quantified a physiological hierarchical relationship among the cell sub-populations. Thus, these results illustrate differential gene expression across the four hematopoietic sub-populations characterized. As such, genes associated with these sub-populations can be grouped and analyzed.

### Example 10

[0152] Analysis was performed to determine the number of genes that were expressed in each cell population by selecting genes with expression levels above the cut-off line defined by a compensation method. The method is described in Example 10. The results of the present analysis are as follows:

TABLE 2

| | HSCs | MPPs | CLPs | CMPs |
|---|---|---|---|---|
| Presence of expression | | | | |
| Genes with expression levels passed cutoff line (more than 100) | 10677 (43%) | 10488 (42%) | 10466 (42%) | 10455 (42%) |
| ESTs (Affymetrix database) | 8600 | 8402 | 8438 | 8471 |
| Known genes | 2077 | 2086 | 2028 | 1984 |
| Genes affiliated with non-hematopoietic tissues | 58 | 58 | 58 | 58 |
| Genes with normalized value more than 0.3 | 43 (74%) | 22 (37%) | 13 (22%) | 4 (7%) |
| Genes affiliated with hematopoiesis | 312 | 312 | 312 | 312 |
| Genes with normalized value more than 0.3 | 133 (42%) | 95 (30%) | 141 (45%) | 80 (26%) |
| Low-level expression (more than 100 but less than 300) | 5891 (24%) | 5840 (23%) | 5826 (23%) | 5844 (23%) |
| Differential expression | | | | |
| Genes passed screening filter (FIG. 2) | 4863 | 4863 | 4863 | 4863 |
| Genes dominantly expressed in each population | 824 (16%) | 723 (13.8%) | 527 (11%) | 665 (12.7%) |
| ESTs (Affymetrix database) | 666 | 609 | 398 | 545 |
| Known genes | 158 | 114 | 129 | 120 |
| Genes affiliated with non-hematopoietic tissues | 48 | 48 | 48 | 48 |
| Genes with normalized value more than 0.3 | 35 (73%) | 18 (37%) | 10 (20%) | 4 (8.3%) |
| Genes affiliated with hematopoiesis | 162 | 162 | 162 | 162 |
| Genes with normalized value more than 0.3 | 63 (39%) | 42 (26%) | 67 (41%) | 40 (25%) |

The total number of genes on the chips was identical at 24 818 for HSCs, MPPs, CLPs, and CMPs. A gene was defined to be present if the expression level of a given gene was greater than 100. Genes that are highly expressed were defined as if a normalized value more than 0.3, here 0.3, is a normalized value (see the color bar for reference).

[0153] As shown in Table 2, about 42% of genes on the chips were detectable in each cell sub-population. Among these, approximately 23% of genes were expressed at low levels in each sub-population of cells. The expression levels of surface markers used for sorting each sub-population (e.g., c-Kit, Sca-1, and IL-7R) determined by the array analysis were consistent with the definition of each sub-population based on FACS analysis, which verifies the quantification of gene expression in the assay (FIG. 1A). In addition, the result of analyzing representative genes using single-cell RT-PCR also verified the microarray analysis (results on file). The pair-wise relationship between HSCs and MPPs, represented by the Pearson correlation coefficient (γHSC-MPP), was 0.951 (FIG. 1A), indicating a significant positive linear correlation of gene expression intensity and diversity between these populations. Likewise, γHSC-CLP and γHSC-CMP were 0.900 and 0.866, and γHSC-CLP and γHSC-CMP were 0.935 and 0.930, respectively. Thus, the numerical correlation values correctly reflect the hierarchical relationship among these purified populations in physiologic hematopoiesis (FIG. 1). Within approximately 2000 known genes that passed the cut-off line, 2 groups of genes were classified as either hematopoiesis- or nonhematopoiesis-affiliated genes according to their tissue-specific expression or functions (Table 2). These genes are shown in FIGS. 2, 3 and 4.

### Example 11

[0154] The genes in the microarray data were considered as differentially expressed and were subsequently screened for clustering analysis with a gene filter given by the following equation: |yⱼ₍ₘ₎−y_{j(l)|>}100 and yⱼ₍ₘ₎/yⱼ₍ₗ₎>2 for j=1, . . . ,n, where yⱼ₍ₘ₎ and yⱼ₍ₗ₎ are the order statistics with yⱼ₍ₗ₎≦ . . . ≦yⱼ₍ₘ₎ for the j^{th} gene. This filtering criterion considers either simultaneously or sequentially the absolute difference (>100) of the gene expression levels and the fold change (>2-fold) of the expression levels for each gene (>100). Thus, 4,863 genes were selected for clustering analysis, including 137 initial seeds.

### Example 12

[0155] Based on an assumption that genes with similar expression behavior (up-regulation or down-regulation under a similar condition) are likely to be related functionally, the relative expression patterns among genes in the targeted population of cells were compared. To analyze the patterns of gene expression, a variety of clustering methods were used, including self-organization maps, hierarchical clustering, and K-means clustering.

[0156] After the comparison of the clustered results, it was observed that the genes grouped by K-means cluster were more related to each other as judged by their known biological functions. That is because K-means clustering gathered genes into groups according to similarity of expression patterns among target populations. Particularly, this method allowed the selection of initial seeds according to known features (genes with known biological functions); then the genes were grouped around selected seeds by K-means clustering. According to known important roles played in hematopoiesis, 137 genes were selected, as stated in the Description of Invention section herein, as the initial seeds. Genes that passed the initial screening filter (1) with an absolute expression level >100 in at least one condition; and (2) with >2 fold changes between at least two conditions) were used for further analysis.

[0157] Thus, 4,863 genes, with their expression intensity normalized by each gene's mean and standard deviation values across the four sub-populations, were then analyzed by K-means clustering using Minitab data analysis software (Minitab, Inc., State College, Pa.) (FIG. 2). The 4,863 genes were grouped into 100 clusters (K=100) based upon similarities in their gene expression patterns (Table 3), each containing a different number of genes.

[0158] The K-means clustering method groups genes together according to the similarity of the various gene expression patterns. The similarity/dissimilarity of the ith and jth genes are given by the Euclidean distance between the two observations:

$${r}_{ik} = \frac{{\sum }_{j = 1}^{n} ( {y}_{ji} - {\overline{y}}_{i} ) ( {y}_{jk} - {\overline{y}}_{k} )}{( n - 1 ) {s}_{i} {s}_{k}} ,$$

[0159] This method is designed to group observations into a collection of K clusters. The value of K can be determined either in advance or as a part of the clustering procedure. This algorithm assigns each item to the cluster having the nearest centroid according to the euclidean distance.

[0160] The method begins with an initial partition of K clusters, or K initial centroids (seed points). Then it proceeds through the list of genes, assigning a gene to the cluster whose centroid is nearest. Next, it involves recalculation of the centroid for the cluster receiving the new gene and for the cluster losing the gene. The process was repeated until no more reassignment of genes occurs. To eliminate variation within the gene expressions, the genes were normalized (or standardized) prior to clustering.

[0161] This method provides for the grouping of associated, similarly functioning genes into gene clusters. Two groups of characterized clusters herein are known as “cumulative clusters” and “representative clusters.” Listed in Table 3 below are clusters known as cumulative clusters. These 100 gene clusters were made with the recited computer program. Similarly, in Table 4 and FIG. 8, representative clusters (i.e., 1 through 8) were also described. Each of these representative clusters contains representative genes that exhibit similar or identical expression patterns.

TABLE 3

| Cluster ID | Mean (HSC) | S.E. Mean (HSC) | Mean (MPP) | S.E. Mean (MPP) | Mean (CLP) | S.E. Mean (CLP) |
|---|---|---|---|---|---|---|
| 1 | 448.369369 | 71.75899208 | 366.4333333 | 60.01488201 | 130.1972973 | 26.51846755 |
| 2 | 248.338148 | 19.98062998 | 224.6555556 | 18.88314956 | 88.19555556 | 11.05239768 |
| 3 | 71.4294574 | 28.58457148 | 336.650969 | 52.2335183 | 114.9639535 | 35.59108305 |
| 4 | 237.377778 | 23.48442702 | 346.9255556 | 37.60970949 | 93.31333333 | 12.9284119 |
| 5 | 114.088141 | 26.28552364 | 256.9926282 | 31.09228068 | 322.7865385 | 36.07733931 |
| 6 | 384.459929 | 37.25715485 | 419.1024823 | 40.06051461 | 101.4553191 | 18.81285968 |
| 7 | 234.074103 | 46.1536519 | 167.5766667 | 40.60195759 | 564.88 | 102.5398899 |
| 8 | 163.837421 | 36.97028916 | 428.2031447 | 105.0076976 | 101.1660377 | 27.15268698 |
| 9 | 403.134333 | 51.13129089 | 419.9643333 | 54.93092859 | 123.196 | 20.58572637 |
| 10 | 393.347024 | 103.7675328 | 380.2565476 | 98.97450547 | 474.7857143 | 123.3186167 |
| 11 | 962.449502 | 266.7171526 | 719.4072139 | 198.6999942 | 417.9253731 | 121.6756873 |
| 12 | 357.946569 | 55.33746123 | 453.4901961 | 65.06149177 | 395.0088235 | 56.81038078 |
| 13 | 184.566667 | 26.13514968 | 212.5143411 | 28.21404584 | 604.8813953 | 64.86053344 |
| 14 | 128.993067 | 15.1980105 | 371.5942667 | 31.5658981 | 346.6064 | 28.84031826 |
| 15 | 628.105556 | 109.5164177 | 453.3111111 | 77.1990812 | 155.1271605 | 32.22296551 |
| 16 | 381.89375 | 80.57129332 | 227.2538194 | 51.094654 | 599.5541667 | 117.022544 |
| 17 | 240.201068 | 33.25453858 | 166.5002137 | 20.17141402 | 844.3987179 | 168.6133667 |
| 18 | 530.625231 | 77.51225999 | 440.9081019 | 65.03506205 | 137.8722222 | 30.23518806 |
| 19 | 1145.20494 | 665.6144793 | 615.6635802 | 389.4444935 | 664.4296296 | 422.8495387 |
| 20 | 573.038498 | 92.60575375 | 339.9420188 | 61.13006507 | 173.1887324 | 38.72661491 |
| 21 | 232.234058 | 32.42901672 | 309.8518116 | 46.95227957 | 130.3173913 | 16.16988652 |
| 22 | 433.324074 | 64.66628409 | 287.837037 | 48.29712466 | 334.9925926 | 52.28002155 |
| 23 | 498.212676 | 99.66738621 | 244.229108 | 49.69863669 | 130.9732394 | 31.89162786 |
| 24 | 386.225 | 90.3722786 | 149.8871212 | 49.06723144 | 355.1590909 | 87.89715844 |
| 25 | 487.064516 | 89.63322237 | 216.2844086 | 32.2333263 | 205.2580645 | 30.20104419 |
| 26 | 891.951852 | 285.91489 | 466.2472222 | 169.4404742 | 586.2888889 | 200.8400236 |
| 27 | 489.601429 | 77.12785123 | 439.8490476 | 69.01183024 | 442.6085714 | 69.19206861 |
| 28 | 297.066667 | 41.57501361 | 92.82156863 | 21.29625645 | 246.1470588 | 33.60110743 |
| 29 | 505.321552 | 99.36891813 | 400.0514368 | 78.29264394 | 287.4637931 | 62.15193684 |
| 30 | 162.740288 | 19.33026395 | 309.1279376 | 28.84849725 | 385.4748201 | 34.79106182 |
| 31 | 300.222436 | 53.78674795 | 104.4589744 | 45.82350908 | 112.9884615 | 46.08655313 |
| 32 | 279.730833 | 38.11767668 | 71.88833333 | 16.7430033 | 144.87 | 23.69863876 |
| 33 | 453.737778 | 88.63285836 | 277.5518519 | 55.70570672 | 105.6377778 | 21.07807379 |
| 34 | 849.241667 | 171.9664638 | 701.5192529 | 143.3742011 | 228.2258621 | 55.80092763 |
| 35 | 589.673214 | 94.44207677 | 268.9464286 | 48.82222768 | 422.6678571 | 69.15293669 |
| 36 | 384.662676 | 54.36726545 | 144.1464789 | 25.15479638 | 82.72394366 | 20.12479511 |
| 37 | 336.783333 | 57.63916858 | 90.12634409 | 32.39737157 | 127.0774194 | 28.95266798 |
| 38 | 141.668304 | 16.13458719 | 242.7983631 | 19.97593269 | 444.2017857 | 34.88448593 |
| 39 | 337.795513 | 43.63204339 | 122.1775641 | 34.81732779 | 150.7615385 | 36.27301225 |
| 40 | 3285.25606 | 988.4652017 | 2104.904545 | 638.2514815 | 1987.890909 | 591.1087871 |
| 41 | 256.618889 | 26.3978332 | 108.3277778 | 13.43742052 | 54.2 | 17.00307342 |
| 42 | 1720.33799 | 438.5484302 | 1153.343382 | 298.7694753 | 878.1823529 | 229.5438306 |
| 43 | 95.5125514 | 19.87738363 | 382.6156379 | 41.47474405 | 268.0938272 | 34.19995746 |
| 44 | 227.061333 | 19.79634178 | 96.81133333 | 18.63043114 | 228.568 | 21.20668033 |
| 45 | 176.704762 | 39.00326262 | 101.8863095 | 31.68220843 | 222.8767857 | 47.81518981 |
| 46 | 894.581548 | 256.1356645 | 367.8714286 | 107.6880431 | 772.05 | 220.0769652 |
| 47 | 464.187654 | 69.71611948 | 591.7685185 | 94.182265 | 335.6740741 | 52.35456113 |
| 48 | 4038.36752 | 999.450683 | 2924.966666 | 734.5688268 | 2769.510256 | 697.7788995 |
| 49 | 44.2356209 | 9.481818286 | 235.7166667 | 17.36974428 | 60.91568627 | 8.975990796 |
| 50 | 338.923134 | 31.17606125 | 402.8803483 | 34.62814513 | 118.5895522 | 15.49197544 |
| 51 | 308.154167 | 71.0637518 | 54.11875 | 25.61163391 | 119.75 | 23.6820097 |
| 52 | 598.726712 | 84.74934241 | 359.7922374 | 50.69874983 | 175.6835616 | 29.71484102 |
| 53 | 405.307895 | 105.1510075 | 540.3787281 | 135.3153465 | 127.7552632 | 21.70818032 |
| 54 | 272.652381 | 32.08903412 | 93.93809524 | 35.34511339 | 156.2 | 30.86864229 |
| 55 | 1171.72051 | 392.3780738 | 696.5673077 | 255.5345525 | 813.2384615 | 292.9672457 |
| 56 | 304.217901 | 51.51391934 | 202.282716 | 38.64246371 | 96.97407407 | 27.17796608 |
| 57 | 374.05641 | 85.49446964 | 117.5647436 | 30.83971667 | 201.7384615 | 45.53796593 |
| 58 | 345.957576 | 69.08672742 | 83.03787879 | 30.49774525 | 230.5 | 50.16892555 |
| 59 | 368.839286 | 111.2935154 | 87.11904762 | 52.16432998 | 184.45 | 63.36841411 |
| 60 | 385.590476 | 83.86591453 | 154.9007937 | 45.4596658 | 442.3666667 | 92.41639267 |
| 61 | 132.826307 | 17.44490209 | 105.0616013 | 19.18017611 | 337.4970588 | 27.65318941 |
| 62 | 856.323214 | 260.7442031 | 450.7964286 | 159.002298 | 372.2678571 | 138.4038474 |
| 63 | 107.154878 | 17.05573901 | 368.454065 | 32.00394251 | 232.6414634 | 22.1677048 |
| 64 | 189.639885 | 19.98760087 | 335.915977 | 27.00201784 | 344.0317241 | 28.12663362 |
| 65 | 157.779915 | 25.91469737 | 217.0313034 | 30.13610496 | 353.4929487 | 41.00862462 |
| 66 | 549.480556 | 128.3040531 | 374.8865079 | 83.39664578 | 166.3714286 | 40.32183324 |
| 67 | 225.061376 | 52.14574297 | 767.2652116 | 158.1627735 | 756.8563492 | 162.3611589 |
| 68 | 477.983951 | 68.89599521 | 301.7098765 | 42.50590991 | 426.4666667 | 59.72299495 |
| 69 | 154.156634 | 14.2347744 | 311.5328479 | 23.32252021 | 195.268932 | 16.42922171 |
| 70 | 215.195 | 31.87292006 | 382.0533333 | 45.78625251 | 108.9525 | 22.4721306 |
| 71 | 152.29058 | 44.24660668 | 362.5155797 | 54.73694545 | 290.3804348 | 51.5229178 |
| 72 | 105.724841 | 23.02416412 | 137.3909766 | 24.26610454 | 604.9522293 | 67.83892292 |
| 73 | 245.044025 | 37.20435029 | 498.5977987 | 73.38648408 | 115.2018868 | 24.46265889 |
| 74 | 130.577729 | 16.81054828 | 336.2861357 | 33.16310399 | 447.3141593 | 40.46352539 |
| 75 | 421.260952 | 104.5705503 | 191.1428571 | 59.96367802 | 130.5314286 | 48.65818486 |
| 76 | 475.328 | 163.2501467 | 187.3366667 | 82.19201921 | 319.324 | 114.1932425 |
| 77 | 1434.4443 | 531.7818093 | 1194.466667 | 446.9158823 | 1021.502632 | 380.0930878 |
| 78 | 318.526042 | 62.41192535 | 91.94895833 | 38.45798861 | 350.06875 | 72.64418176 |
| 79 | 176.45812 | 16.49812767 | 151.1064103 | 16.15094352 | 81.90769231 | 12.50139122 |
| 80 | 280.587778 | 61.23843984 | 90.95555556 | 35.80317268 | 209.0266667 | 49.84729583 |
| 81 | 259.124074 | 24.70749618 | 115.8716049 | 14.83105123 | 35.76296296 | 15.88324939 |
| 82 | 353.495 | 71.57508002 | 90.64583333 | 33.45488541 | 135.29 | 31.77043056 |
| 83 | 790.996465 | 151.6313802 | 446.7161616 | 86.14653795 | 375.6727273 | 77.2104978 |
| 84 | 502.147799 | 89.93245152 | 234.1742138 | 36.21531479 | 108.6792453 | 11.88131876 |
| 85 | 202.159091 | 27.93289851 | 95.18939394 | 21.78176818 | 347.1840909 | 48.05090203 |
| 86 | 218.812255 | 15.72600796 | −19.26372549 | 15.04663684 | −30.76029412 | 13.36115462 |
| 87 | 258.814583 | 26.2046869 | 76.26770833 | 17.21699879 | 180.39375 | 19.26275869 |
| 88 | 279.607778 | 30.40740298 | 88.03444444 | 20.05388386 | 149.72 | 20.94927025 |
| 89 | 817.314431 | 121.2359088 | 837.1373984 | 126.934881 | 327.5219512 | 46.48829629 |
| 90 | 1001.30476 | 234.7393339 | 952.6112245 | 210.8770982 | 655.977551 | 146.0315606 |
| 91 | 160.694805 | 74.4112059 | 317.8950216 | 97.83162379 | 509.7480519 | 154.9252292 |
| 92 | 177.638211 | 12.8465989 | 80.66585366 | 12.21418838 | 106.4097561 | 15.59600981 |
| 93 | 291.496099 | 40.95911575 | 463.4382979 | 61.60463808 | 296.5702128 | 41.69785109 |
| 94 | 294.153704 | 52.5387391 | 330.8551852 | 63.76196922 | 483.8444444 | 79.99064381 |
| 95 | 473.742949 | 56.24688319 | 397.8817308 | 47.33807381 | 136.0711538 | 25.49506212 |
| 96 | 295.971569 | 48.83349476 | 128.6333333 | 30.54305816 | 365.8735294 | 58.22596041 |
| 97 | 259.173077 | 37.72491891 | 59.44615385 | 17.72249084 | 161.8230769 | 24.35557682 |
| 98 | 526.74596 | 117.3129772 | 334.0611111 | 66.74004147 | 610.6575758 | 134.8865275 |
| 99 | 38.207989 | 21.68649369 | 77.04421488 | 20.68904565 | 107.1933884 | 16.56129614 |
| 100 | 360.079825 | 66.16883521 | 204.9846491 | 47.15869098 | 533.2736842 | 95.37155876 |

| | | | Number of Genes |
|---|---|---|---|
| | | | In |
| Cluster ID | Mean (CMP) | S.E. Mean (CMP) | Cluster |
| 1 | 381.0513514 | 60.61087582 | 37 |
| 2 | 285.32 | 23.3711003 | 45 |
| 3 | 88.11627907 | 25.04524108 | 86 |
| 4 | 339.4111111 | 34.45364199 | 45 |
| 5 | 130.9807692 | 24.92059668 | 52 |
| 6 | 359.7574468 | 34.42846258 | 47 |
| 7 | 248.0676923 | 51.43251212 | 65 |
| 8 | 513.8037736 | 151.3182311 | 53 |
| 9 | 201.458 | 27.65786881 | 50 |
| 10 | 146.4607143 | 60.21042056 | 28 |
| 11 | 316.3313433 | 95.06936212 | 67 |
| 12 | 143.3441176 | 26.68703751 | 34 |
| 13 | 386.7775194 | 41.50499303 | 129 |
| 14 | 438.2048 | 37.94664828 | 125 |
| 15 | 221.8592593 | 40.36637298 | 81 |
| 16 | 178.3375 | 39.73554474 | 48 |
| 17 | 132.25 | 19.3673559 | 78 |
| 18 | 367.4347222 | 55.99178005 | 72 |
| 19 | 427.762963 | 283.9371828 | 27 |
| 20 | 239.8830986 | 49.46814441 | 71 |
| 21 | 474.2173913 | 76.18196056 | 46 |
| 22 | 146.6888889 | 30.03658184 | 27 |
| 23 | 129.0126761 | 31.55152019 | 71 |
| 24 | 207.3727273 | 61.71632779 | 22 |
| 25 | 152.3645161 | 24.76281228 | 31 |
| 26 | 359.6666667 | 135.989351 | 18 |
| 27 | 170.3428571 | 33.94026123 | 35 |
| 28 | 196.7470588 | 28.76979129 | 17 |
| 29 | 188.6396552 | 47.15021168 | 58 |
| 30 | 476.5611511 | 42.07732063 | 139 |
| 31 | 202.7461538 | 47.27555076 | 26 |
| 32 | 191.97 | 31.46440771 | 20 |
| 33 | 267.0311111 | 52.33885532 | 45 |
| 34 | 238.8344828 | 50.84490197 | 58 |
| 35 | 172.7821429 | 35.83495126 | 28 |
| 36 | 101.0859155 | 22.36928237 | 71 |
| 37 | 84.86451613 | 29.43606505 | 31 |
| 38 | 428.8982143 | 33.54816334 | 112 |
| 39 | 193.4307692 | 37.07208893 | 26 |
| 40 | 1288.80303 | 383.7007572 | 33 |
| 41 | 195.62 | 18.61673972 | 30 |
| 42 | 614.5352941 | 165.7304504 | 68 |
| 43 | 233.4592593 | 27.30283675 | 81 |
| 44 | 277.14 | 20.45537256 | 25 |
| 45 | 320.6410714 | 63.72266461 | 56 |
| 46 | 258.1678571 | 88.1660424 | 28 |
| 47 | 184.612963 | 33.81060157 | 54 |
| 48 | 1691.846154 | 440.8697087 | 39 |
| 49 | 127.972549 | 9.274926807 | 51 |
| 50 | 251.6895522 | 23.97565148 | 67 |
| 51 | 50.2625 | 25.58960869 | 16 |
| 52 | 172.4342466 | 27.75891325 | 73 |
| 53 | 117.9355263 | 19.69402721 | 76 |
| 54 | 261.7214286 | 32.25918249 | 14 |
| 55 | 452.1730769 | 192.735278 | 26 |
| 56 | 237.5333333 | 41.75893067 | 27 |
| 57 | 129.6192308 | 32.02946481 | 26 |
| 58 | 139.0272727 | 31.93614963 | 11 |
| 59 | 150.1428571 | 55.93588433 | 14 |
| 60 | 290.3238095 | 68.53116875 | 21 |
| 61 | 362.9892157 | 30.27819444 | 102 |
| 62 | 314.3607143 | 125.6865705 | 28 |
| 63 | 357.402439 | 32.82499832 | 82 |
| 64 | 564.8213793 | 42.73954848 | 145 |
| 65 | 492.6916667 | 52.60252269 | 156 |
| 66 | 284.347619 | 63.80985648 | 42 |
| 67 | 587.3880952 | 102.7515614 | 126 |
| 68 | 151.2444444 | 23.99980492 | 27 |
| 69 | 480.0029126 | 39.72414823 | 103 |
| 70 | 240.475 | 32.02751857 | 40 |
| 71 | 110.0521739 | 43.01130598 | 46 |
| 72 | 145.9624204 | 24.13041594 | 157 |
| 73 | 95.03207547 | 21.68366463 | 53 |
| 74 | 401.4619469 | 35.81746588 | 113 |
| 75 | 237.5628571 | 63.69547206 | 35 |
| 76 | 164.292 | 84.45710172 | 25 |
| 77 | 581.8947368 | 238.2954508 | 38 |
| 78 | 301.5625 | 60.823648 | 16 |
| 79 | 281.6128205 | 25.00683528 | 39 |
| 80 | 249.62 | 56.38702671 | 15 |
| 81 | 271.7851852 | 26.14160633 | 27 |
| 82 | 136.88 | 33.64773129 | 20 |
| 83 | 276.3727273 | 56.51908321 | 33 |
| 84 | 207.8490566 | 27.54436988 | 53 |
| 85 | 246.3295455 | 32.13481357 | 44 |
| 86 | 0.710294118 | 11.26354947 | 68 |
| 87 | 178.7875 | 20.98868123 | 16 |
| 88 | 152.4333333 | 20.37282426 | 15 |
| 89 | 244.8231707 | 38.03358657 | 82 |
| 90 | 326.0244898 | 70.59633908 | 49 |
| 91 | 306.9961039 | 100.3444194 | 77 |
| 92 | 267.3243902 | 19.73209246 | 41 |
| 93 | 147.8723404 | 26.8167007 | 47 |
| 94 | 151.4044444 | 34.63235422 | 45 |
| 95 | 250.6692308 | 32.62296549 | 52 |
| 96 | 142.6794118 | 32.53497084 | 34 |
| 97 | 130.4923077 | 23.93208998 | 13 |
| 98 | 208.9666667 | 44.23172253 | 33 |
| 99 | 327.6272727 | 25.35405554 | 121 |
| 100 | 282.1815789 | 50.30196129 | 38 |

[0162] TABLE 4
Cluster 1-Genes Down-Regulated in MPP as Compared to HSC

| | | | Fold Changes |
|---|---|---|---|
| Gene Name | GeneBank Reference | Functional Category | MPP vs HSC |
| AML-1 (Cbfa1/Osf2/Runx2) | D14636 | A | −2.4 |
| CCAAT/enhancer binding protein (C/EBP), beta | M61007 | A | −2.6 |
| Gut enriched Kruppel-like factor | U20344 | A | −2.2 |
| Jun-B | U20735 | A | −3.5 |
| Transcription factor LRG-21 | U19118 | A | −2.1 |
| Zinc finger protein 36 | X14578 | A | −2.8 |
| FMS-like tyrosine kinase 3 | X59398 | C | −2.3 |
| Phosphatidylinositol 3-kinase regulatory subunit | AV028190 | C | −4.6 |
| Ly-6E.1 alloantigen (Sca-1) | XD4653 | D | −3.7 |
| N10 a nuclear hormonal binding receptor | X16995 | D | −2 |
| Flamingo 1 | AB028499 | E | −2.4 |
| Notch-1 | AV374287 | E | −5 |
| Cathepsin S | AJ223208 | G | −5 |
| Retinol binding protein 1, cellular | X60367 | I | −2.1 |
| Fibroblast growth factor 4 (FGF-4) | X14849 | J | −2.2 |
| Small inducible cytokine A3 | J04491 | J | −2.2 |
| TGF beta-induced protein, 68 kDa | L19932 | J | −2.4 |
| Protein tyrosine phosphatase (PAC-1) | U09268 | K | −2.2 |

Cluster 2-Genes Up-Regulated in MPP as Compared to HSC

| | | | Fold Changes |
|---|---|---|---|
| Gene Name | GeneBank Reference | Functional Category | MPP vs HSC |
| Hepatic nuclear factor 6 (HNF-6) | U95945 | A | 2.3 |
| CDC28 protein kinase | AA681998 | C | 3.3 |
| Janus kinase 2 (JAK2) | L16956 | C | 2.1 |
| Serine/threonine kinase (nek2) | AF013166 | C | 3.2 |
| Serine/threonine kinase (sak-b) | L29480 | C | 3.1 |
| Serine/threonine kinase 6 | U80932 | C | 3.3 |
| CD48 antigen | X53526 | D | 3.8 |
| Male enhanced antigen 1 | D17341 | D | 2.1 |
| Acetyltransferase Tubedown-1 | A1645561 | E | 2.6 |
| Bone morphogenetic protein BMP-4 | L47480 | E | 2 |
| Wnt10a | U61969 | E | 2.4 |
| Caspase-3 | U54803 | G | 2.4 |
| Cathepsin G | X70057 | G | 2.6 |
| Heat shock protein (Hsp70) | U08215 | G | 2.3 |
| T-IAP (Inhibitor of Apoptosis) | AB013819 | G | 3.6 |
| Budding inhibited by benzimidazoles 1 (BUB1) homlg | AF002823 | H | 2.0 |
| Cell division cycle control protein 2a | M38724 | H | 6.2 |
| Cyclin A2 | X75483 | H | 6.7 |
| Cyclin B1 | X64713 | H | 2.4 |
| Cyclin B2 | X66032 | H | 2.2 |
| Cyclin F | Z47766 | H | 2.5 |
| Kinesin-related mitotic motor protein | AJ223293 | H | 4.0 |
| Mitotic centromere-associated kinesin | AA007891 | H | 2.2 |
| Mitotic checkpoint component Mad2 | U83902 | H | 2.9 |
| Mitotic checkpoint protein kinase BUB1B (Bub1b) | AW049504 | H | 4.9 |
| Rab6, kinesin-like (Rab6kil) | AV059766 | H | 4.4 |
| Replication factor C 4 (RFC4) | AW122092 | H | 3.0 |
| Telomeric repeat binding factor 2 (TERF-2) | AW122405 | H | 2.0 |
| Chemokine (C-C) receptor 1-like | U28405 | J | 2.1 |
| Cytokine receptor-like factor 1 (Crlf1) | AA270365 | J | 2.4 |
| Fibroblast growth factor 2 (FGF-2) | AF065903 | J | 2 |
| Small inducible cytokine A9 | U49513 | J | 2.4 |
| DDX3 (Putative RNA helicase) | AI047912 | N | 2.2 |
| Eukaryotic translation initiation factor 4B (elF4B) | AW121930 | N | 2.2 |
| U5 small nuclear ribonucleoprotein (Snrp116) | U97079 | N | 2.8 |
| Karyopherin (importin) alpha 2 | D55720 | O | 3.5 |
| High mobility group protein homolog HMG4 (Hmg4) | AF022465 | P | 2.2 |

Cluster 3-Genes Down-Regulated in Both CLP and CMP as Compared to MPP

| | | | Fold Changes | |
|---|---|---|---|---|
| Gene Name | GeneBank Reference | Functional Category | CLP vs MPP | CMP vs MPP |
| Activating transcription factor 4 (ATF-4) | M94087 | A | −2.3 | −2.8 |
| Core promoter element binding protein (COPEB) | AI846501 | A | −16.8 | −17.9 |
| Early growth response 1 (egr1) | M28845 | A | −2.4 | −2.2 |
| Jun-D | J04509 | A | −4.4 | −7.5 |
| Transcription factor LRG-21 | U19118 | A | −6.3 | −12.2 |
| Zinc finger protein 36 | X14678 | A | −3.2 | −3.9 |
| G protein signaling regulator RGS2 (rgs2) | U67187 | C | −3.3 | −2.4 |
| Male enhanced antigen 1 | D17341 | D | −2.2 | −2.3 |
| Bone morphogenetic protein BMP-4 | L47480 | E | −2.2 | −2.9 |
| RhoB | X99963 | G | −2.5 | −2.3 |
| Secretory leukocyte protease inhibitor (Slpi) | AV093322 | G | −2.2 | −2.8 |
| Fibroblast growth factor 2 (FGF-2) | AF065903 | J | −2.9 | −2 |
| EEF-Tu encoding elongation factor Tu | M17878 | N | −2.4 | −4.2 |
| Eosinophil 2ndary granule ribonuclease-1 (mEAR-1 | U72032 | N | −12.6 | −11.6 |
| Eosinophil-associated ribonuclease 3 (Ear3) | AF017258 | N | −7.1 | −11.5 |

Cluster 4-Genes Up-Regulated in Both CLP and CMP as Compared to MPP

| | | | Fold Changes | |
|---|---|---|---|---|
| Gene Name | GeneBank Reference | Functional Category | CLP vs MPP | CMP vs MPP |
| 11-zinc-finger transcription ffactor (CTCF) | U51037 | A | 6.3 | 6.3 |
| Bromodomain adjacent to zinc finger domain, 2A | AW122821 | A | 4.6 | 4.1 |
| CDC45-related protein (Cdc45) | AF098068 | A | 4.4 | 6.2 |
| Core binding factor alpha 1 (Cbfa1/Osf2/Runx2) | D14636 | A | 5.9 | 3.4 |
| Forkhead box M1 (Foxm1) | Y11245 | A | 3.5 | 4.0 |
| Ikaros DNA binding protein | L03547 | A | 4.9 | 2.1 |
| LIM-only domain transcription factor LMO-4 | AF074600 | A | 4.9 | 6.5 |
| Max-interacting transcriptional repressor (Mad4) | U32395 | A | 2.5 | 2 |
| N-Myc interactor (Nmi) | AF019249 | A | 2.1 | 2.0 |
| Nuclear transcription factor RelA (Rela) | AI845667 | A | 3.1 | 3.5 |
| pOU domain, class 2, transcription factor 1 (Oct-1B) | X68363 | A | 2.4 | 2.9 |
| Taube nuss | AW214244 | A | 3.3 | 3.4 |
| Zinc finger protein 265 (Zip265) | AI835041 | A | 3.7 | 4.8 |
| Janus kinase 3 (JAK 3) | L40172 | C | 2.2 | 4.5 |
| Protein kinase Chk2 (Chk2) | AF086905 | C | 2.3 | 3.3 |
| RAN GTPase activating protein 1 | U20857 | C | 2.9 | 3.5 |
| Ras-related protein (Krev-1) | AW049685 | C | 2.3 | 2.3 |
| Serine-threonine protein kinase (MNBH) | AW124678 | C | 3.2 | 3.1 |
| Smad4 | U79748 | C | 4.1 | 4.4 |
| STATG | L47650 | C | 3.2 | 3.9 |
| CD164 (MGC-24v) | AB014464 | D | 2 | 2 |
| CD1d1 antigen | M63695 | D | 2.4 | 2.8 |
| CD44 antigen | X66084 | D | 2.8 | 2.1 |
| Fibronectin receptor beta-chain (VLA5-homolog) | X15202 | D | 2.1 | 3.6 |
| Inositol trisphosphate receptor type 2 (Itpr2) | AF031127 | D | 4.4 | 2.1 |
| Lymphocyte antigen 86 (Ly86) | AB007599 | D | 9.4 | 4.1 |
| Steroid receptor RNA activator 1 (Sra1) | AW122167 | D | 2.5 | 2.7 |
| Granule cell differentiation protein (Gcdp) | D78188 | E | 2.2 | 2.6 |
| Notch-1 | AV374287 | E | 14.2 | 7.0 |
| Apoptosis-related RNA binding protein (Napor-3) | AW061318 | G | 3.1 | 3.5 |
| BH3 interacting domain death agonist | U75506 | G | 2.6 | 3.2 |
| Caspase-3 | U54803 | G | 3.8 | 4.4 |
| Caspase-6 | Y13087 | G | 4.2 | 2.9 |
| Caspase-8 | AJ007749 | G | 5.5 | 4.5 |
| Catalase | M29394 | G | 2.9 | 3.2 |
| Hypoxia inducible factor 1, alpha subunit | F003695 | G | 2.6 | 2.2 |
| Cyclin-dependent kinase homologue (p130PITSL) | L37092 | H | 2.0 | 2.0 |
| mutant p53 | AB021961 | H | 3.1 | 5.2 |
| Myb proto-oncogene | M12848 | H | 2.1 | 2.5 |
| Myelocytomatosis oncogene | L00039 | H | 2.4 | 3 |
| RAB9, member RAS oncogene family (Rab9) | AB027290 | H | 3.1 | 5.8 |
| Relinoblastoma-like 1 (p107) | U27177 | H | 2.4 | 2.4 |
| Lcr-1 (CXCR-4 homologue) | Z80112 | I | 4.6 | 3.9 |
| Stromal cell derived factor receptor 1 (Sdfrt) | D50463 | I | 2.5 | 3.1 |
| Interferon (alpha and beta) receptor | M89641 | J | 4.4 | 3.9 |
| Phosphatase and tensin homolog (PTEN) | U92437 | K | 7.6 | 3.4 |

Cluster 5-Genes Down-Regulated in CLP and CMP as Compared to CMP and MPP

| | | | Fold Changes | |
|---|---|---|---|---|
| Gene Name | GeneBank Reference | Functional Category | CLP vs CMP | CLP vs MPP |
| Friend of GATA-1 (FOG) | AF006492 | A | −10.8 | −7.2 |
| GATA-binding protein 1 | X15763 | A | −8.6 | −2.0 |
| GATA-binding protein 2 | AB000096 | A | −22.6 | −9.8 |
| LIM-only domain transcription factor LMO-2 | M64360 | A | −3.4 | −3.6 |
| Apolipoprotein E | D00466 | B | −76.6 | −13.5 |
| G-protein coupled thrombin receptor | AW123850 | D | −3.5 | −5.7 |
| Transferrin receptor 2 (Trfr2) | AI596094 | D | −3.7 | −4.0 |
| Tyrosine kinase receptor 1 (Tie1) | AV235418 | D | −9.1 | −2.6 |
| Cathepsin G | X70057 | G | −46 | −6 |
| Myeloperoxidase | X15313 | G | −11.4 | −4.7 |
| Proteinase 3 | U43525 | G | −17.8 | −7.6 |
| Spi2 proteinase inhibitor (spi2/eb1) | M64085 | G | −38.4 | −25.0 |
| Retinol binding protein 1, cellular | X60367 | I | −7.2 | −5.0 |
| Small inducible cytokine A9 | U49513 | J | −26.6 | −10.2 |
| Neutrophil elastase | UD4962 | K | −11.5 | −3.5 |

Cluster 6-Genes Up-Regulated in CLP as Compared to CMP and MPP

| | | | Fold Changes | |
|---|---|---|---|---|
| Gene Name | GeneBank Reference | Functional Category | CLP vs CMP | CLP vs MPP |
| Basic-helix-loop-helix protein (bHLH) | Y07836 | A | 3.3 | 2.1 |
| B-cell-specific coactivator BOB.1/OBF.1 | Z54283 | A | 8.1 | 3.3 |
| AML-1 (Cbfa1/Osf2/Runx2) | D14636 | A | 2.1 | 5.9 |
| Ikaros DNA binding protein | L03547 | A | 2.4 | 4.9 |
| Inhibitor of DNA binding 2 (ID-2) | AF077861 | A | 30.9 | 9.3 |
| T-cell specific transcription factor 7 (Tcf7) | AI019193 | A | 12.6 | 4.7 |
| Tubby super-family protein (Tusp) | AI848591 | A | 8.1 | 2.8 |
| Cytochrome c oxidase subunit V1aH | U08439 | B | 108.1 | 26.4 |
| B lymphoid kinase | M30903 | C | 13.3 | 4.6 |
| FMS-like tyrosine kinase 3 | X59398 | C | 4.1 | 2.8 |
| Intracellular calcium-binding protein (MRP14) | M83219 | C | 31.7 | 4.6 |
| Intracellular calcium-binding protein (MRP8) | M83218 | C | 31.4 | 3.2 |
| LIM-kinase 1 (Limk1) | AW125574 | C | 2 | 2.2 |
| Rearr. lymphocyte protein-tyrosine kinase (LCK) | M12056 | C | 9.7 | 9.5 |
| Smad7 | AF015260 | C | 3.5 | 3.2 |
| B cell linker protein BLNK | AF068182 | D | 78.3 | 22.1 |
| Interleukin 7 receptor | M29697 | D | 36.8 | 16.1 |
| Interleukin-18 receptor accessory protein-like | AF077347 | D | 6.5 | 4.2 |
| Lymphocyte antigen 6 complex, locus D | X63782 | D | 125.3 | 44.7 |
| NK (natural killer) cell receptor 2B4 (CD244) | L19057 | D | 2.2 | 2.3 |
| Putative transmembrane receptor IL-1Rrp | U43673 | D | 9.9 | 3.6 |
| Hairy and enhancer of split 6 | AW048812 | E | 2.4 | 2.3 |
| Notch-1 | AV374287 | E | 26.6 | 14.2 |
| Cathepsin S | AJ223208 | G | 2.9 | 4.4 |
| Pre-B lymphocyte 1 (Vpreb1) | AV015107 | I | 36.6 | 13.5 |
| Recombination activating 1 (Rag-1) | M29475 | I | 43.2 | 13.4 |
| Recombination activating 2 (Rag-2) | M64796 | I | 11.1 | 4.2 |
| T-cell receptor beta-chain constant region | M26056 | I | 9.1 | 4.8 |
| Terminal deoxynucleotidyl transferase (Tdt) | AV312871 | I | 21.6 | 31.5 |
| Interleukin 12a | M86672 | J | 6.2 | 7.6 |
| Lymphotoxin-beta | U16985 | J | 5.9 | 6.2 |
| Small inducible cytokine A5 | AF065947 | J | 13.2 | 2.1 |

Cluster 7-Genes Down-Regulated in CMP as Compared to CLP and MPP

| | | | Fold Changes | |
|---|---|---|---|---|
| Gene Name | GeneBank Reference | Functional Category | CMP vs CLP | CMP vs MPP |
| Gul enriched Kruppel-like factor | U20344 | A | −2.3 | −4.8 |
| TGF-beta-stimulated clone-22 (TSC-22) | X62940 | A | −2.6 | −3.6 |
| Cytohesin binding protein (Cbp) | AI120844 | C | −2.5 | −2.6 |
| Intracellular calcium-binding protein (MRP14) | M83219 | C | −31.7 | −2.9 |
| Gamma-aminobutyric acid (GABA-A) receptor | X59300 | D | −2.1 | −2.5 |
| N10 a nuclear hormonal binding receptor | X16995 | D | −2.5 | −2.8 |
| Frizzled homolog 8 (Drosophila) | U43321 | E | −2.7 | −2.2 |

Cluster 8-Genes Up-Regulated in CMP as Compared to CLP and MPP

| | | | Fold Changes | |
|---|---|---|---|---|
| Gene Name | GeneBank Reference | Functional Category | CMP vs CLP | CMP vs MPP |
| cAMP response element binding protein (CREB) | U46026 | A | 2.1 | 3.4 |
| CCAAT/enhancer binding protein (C/EBP), delta | X61800 | A | 6 | 3.2 |
| Double LIM protein-1 | D88792 | A | 4.2 | 2.2 |
| Erythrocyte protein band 4.1 | L00919 | A | 7.6 | 2.9 |
| Metallotihionein 1 | V00835 | A | 10.8 | 3.8 |
| Apolipoprotein E | D00466 | B | 76.6 | 2.4 |
| Histidine decarboxylase cluster | X57437 | B | 12.3 | 3.1 |
| (TNFRSF)-interacting serine-threonine kinase 1 | U25995 | C | 3.2 | 2.2 |
| CD9 antigen | L08115 | D | 7.9 | 2.4 |
| c-kit | Y00864 | D | 4 | 2 |
| Colony stimulating factor 1 receptor | X06368 | D | 2 | 2.3 |
| Granulocyte colony-stimulating factor receptor | M58288 | D | 23.7 | 4.6 |
| MCP-1 Receptor | U56819 | D | 2.2 | 3.3 |
| TNF receptor superfamily, member 1a | X57796 | D | 6.9 | 3.9 |
| Cathepsin G | X70057 | G | 46 | 5.3 |
| Cathepsin Z precursor (clsZ) | AJ242663 | G | 2.9 | 3 |
| Granzyme F | AI504305 | G | 3.9 | 6.9 |
| Myeloperoxidase | X15313 | G | 11.4 | 2.2 |
| c-fes proto-oncogene | X12616 | H | 4.3 | 4.1 |
| Beta Fc receptor type II (FCRII) | M31312 | I | 9.0 | 3.1 |
| Small inducible cytokine A9 | U49513 | J | 26.6 | 2.6 |
| Transforming growth factor-beta 1 | AJ009862 | J | 4.9 | 6.2 |
| GTP-binding protein (Rab3D) | M89777 | O | 11.7 | 4.9 |
| Histone H1x | AI851599 | P | 10.5 | 2.9 |
| Rad1 DNA damage checkpoint protein | AF073523 | P | 5.6 | 3.5 |

### Example 13

[0163] The data of Table 1 were processed using the K-means clustering. Transcripts of a variety of non-hematopoietic genes were detected in cells undergoing early hematopoiesis (Tables 1, 2). HSCs expressed 43 of 58 genes specific to non-hematopoietic tissues, detected by chip hybridization. These non-hematopoietic tissues included brain, liver, heart, kidney, pancreas, muscle, and endothelium, as listed in FIG. 3. Expression of the majority of these non-hematopoietic genes was progressively attenuated in MPPs and downstream CMPs and CLPs. Thus, promiscuous expression of non-hematopoictic genes (i.e., non-hematopoietic promiscuity) was most pronounced in the HSC population (Tables 1, 2).

[0164] To exclude the possibility that the non-hematopoietic gene RNA transcripts were derived from bone marrow non-hematopoietic cells sharing the same phenotype as HSCs, a hematopoietic cell population was purified using CD45, a hematopoiesis-specific marker. cRNA was amplified from highly purified long-term HSCs of Lin⁻CD34^{-/lo}c-Kit⁺Sca-1⁺CD45⁺ phenotype (FIGS. 1A, 6). The nucleic acids were again hybridized to the MGU-74A chip, resulting in a similar expression pattern of hematopoietic and non-hematopoietic genes.

[0165] Four genes were randomly chosen (SBP-1, GnRH, N-RAP, and Phox2) from the list of expressed genes. These genes were tested for expression by RT-PCR targeting for 1 and 10 cells of CD45+HSCs. SBP-1 is a selenium-binding liver protein; GnRH regulates the production of testosterone via the hypothalamic-pituitary-gonadal axis; N-RAP encodes a Nebulin-related protein and is specifically expressed in skeletal and cardiac muscle; and Phox2 is required for induction of expression of pan-neuronal genes, including tyrosine hydroxylase (TH). As shown in FIG. 3C, these genes were detectable at single or 10 cell levels. Differences in cell numbers required for positive detection in RT-PCR analyses might represent the frequency of cells expressing these target genes, the difference in copy numbers of transcripts per cell, or both. Thus, it was determined that it is likely that a majority of non-hematopoietic genes detected in the Affymetrix chip are expressed in a significant population of CD45⁺ HSCs. This data is useful in mapping non-hematopoietic genes.

### Example 14

[0166] Single-cell RT-PCR was used to confirm the array results of Example 6 for several representative genes.

[0167] Single cell RT-PCR was carried out according to a previous report with slight modifications, including 1) single cells of HSC and MPP were directly triple-sorted into 96-well arrays of 0.2 ml microamp tubes; and, 2) the lysis buffer contained 0.5% Triton® X-100 (Sigma-Aldrich Corp., St. Louis, Mo.), instead of 0.4% NP-40. Nested primers for each gene were used for the second round PCR. Primers used for RT-nested-PCR are listed as follows: HPRT: SEQ ID NO 4864 F1, 5′GGGGGCTATAAGTTCTTTGC3′ and SEQ ID NO 4865 R1, 5′TCCAACACTTCGAGAGGTCC3′; SEQ ID NO 4866 F2, 5′GTTCTTTGCTGACCTGCTGGC′ and SEQ ID NO 4867 R2, 5′TGGGGCTGTACTGCTTAACC3′. MHCII.2A: SEQ ID NO 4868 F1, 5′CCCATGTCAGAGCTGACAGAGA3′ and SEQ ID NO 4869 R1, 5′CAAGGGAAAAGCAAGTTG3′; SEQ ID NO 4870 F2, 5′ATCGTGGTGGGCACCATC3′ and SEQ ID NO 4871 R2, 5′TGGGGGTCACTTGAAGAAG3′. ESK; SEQ ID NO 4872 F1, 5′CTTGGCTTTCAGAGACGA3′ and SEQ ID NO 4873 R1, 5′TGACTATACCGACCAATC3′; SEQ ID NO 4874 F2, 5′ATTTAGAAATGGAGGCT3′ and SEQ ID NO 4875 R2, 5′AATTCAACCAGTTCTCTGGG3′. CyclinA2: SEQ ID NO 4876 F1, 5′AAATGTAAACCTAAAGTGGG3′ and SEQ ID NO 4877 R1, 5′AAATGTAAACCTAAAGTGGG3′; SEQ ID NO 4878 F2, 5′CATGAAGAGGCAACCAGACA3′ and SEQ ID NO 4879 R2, 5′CGAAGCTAGCAGCATAGCAG3′.

[0168] The relative expression levels of lineage-affiliated genes such as G-CSFR, C/EBPα, GATA-1, and λ5, in each sub-population correlated with those estimated by semi-quantitative RT-PCRs. Furthermore, single cell RT-PCR analyses of MHCII.2A, ESK and Cyclin A2 (representative of genes from HSCs and MPPs) revealed that the relative quantity of gene expression levels detected on the oligonucleotide array correlated with percentages of cells that express the corresponding genes (FIG. 6).

### Example 15

[0169] The expression patterns displayed by the K-means clustering method of Example 12 were converted into illustrations using Spotfire® software. Genes were classified that were predominantly expressed in the targeted four sub-populations of hematopoietic cells into gene clusters shown in FIG. 5A through 5D.

[0170] The clusters were illustrated using Eisen's software package to analyze the normalized data from the 4,863 genes to obtain a global view of their expression patterns, which is shown in FIGS. 2, 3, and 4. The pattern of the genes in each cluster can be clearly viewed through the normalized genes in each cluster. The genes up-regulated in HSC (SEQ ID NOs 3428-4863) initially are shown to down-regulate as lineage commitment occurs. FIGS. 4B-4D show genes up-regulated in MPP (SEQ. ID NOs, 2076-3427), FIG. 4A shows CLP (SEQ. ID NOs. 1-821), and CMP (SEQ. ID NOs. 822-2075), respectively. Listed in Tables 3 and 4 are several clusters of known genes based on their gene expression patterns during the progression of HSC proliferation and differentiation.

[0171] In conclusion, a method which correlates gene expression with lineage development was shown. In particular, gene intensity was shown to vary according to a given cell stage. As such, this provides an illustration of the mode by which genes are up- and down-regulated during cell lineage commitment.

### Example 16

[0172] The data of Table 2 is further analyzed and explained. Transcripts of a variety of non-hematopoietic genes were detected in cells undergoing early hematopoiesis (Table 2). HSCs expressed 43 of 58 genes specific to non-hematopoietic tissues detected by chip hybridization. These non-hematopoietic tissues included brain, liver, heart, kidney, pancreas, muscle, and endothelium, as listed in FIG. 3. Expression of the majority of these non-hematopoietic genes was progressively attenuated in MPPs and downstream CMPs and CLPs. Thus, promiscuous expression of non-hematopoietic genes (i.e., non-hematopoietic promiscuity) was most pronounced in the HSC population (Table 2).

[0173] To exclude the possibility that the non-hematopoietic gene transcripts may be derived from bone marrow non-hematopoietic cells sharing the phenotype with HSCs, hematopoietic cell sub-populations were purified using CD45, a hematopoiesis-specific marker. cRNA was amplified from highly purified long-term HSCs of Lin⁻CD34^{-/lo}c-Kit⁺Sca-1⁺CD45⁺ phenotype (FIG. 1). The nucleic acids were again hybridized to the MGU-74A chip, resulting in a similar expression pattern of hematopoietic and non-hematopoietic genes. Four genes were randomly chosen (SBP-1, GnRH, N-RAP, and Phox2) from the list of expressed genes. These genes were tested for expression by RT-PCR targeting for 1 and 10 cells of CD45+HSCs. SBP-1 is a selenium-binding liver protein; GnRH regulates the production of testosterone via the hypothalamic-pituitary-gonadal axis; N-RAP encodes a Nebulin-related protein and is specifically expressed in skeletal and cardiac muscle; and Phox2 is required for induction of expression of panneuronal genes, including tyrosine hydroxylase (TH).

[0174] These four genes were detectable at single or 10 cell levels. Differences in cell numbers required for positive detection in RT-PCR analyses might represent the frequency of cells expressing these target genes, the difference in copy numbers of transcripts per cell, or both. Thus, it was determined that it is likely that a majority of non-hematopoietic genes detected in the Affymetrix chip are expressed in a significant population of CD45⁺ HSCs. This data is useful in mapping non-hematopoietic genes.

### Example 17

[0175] From the clustering data, it was determined that hematopoiesis-affiliated genes on a chip contained 160 lymphoid-, 117 myeloid-, and some stern/progenitor-related genes. A partial list of these genes is shown in FIG. 4. HSCs expressed more than 40% of the hematopoiesis-related genes. Interestingly, HSCs expressed GM- and MegE-affiliated genes, including myeloid cytokine receptors and transcription factors, but only a limited number of lymphoid genes. In contrast, MPPs expressed about 30% of hematopoietic genes related to both lymphoid (T and B) and myeloid (GM and Meg E) lineages. CMPs expressed 26% of myeloid (GM- and MegE-affiliated) genes, but not lymphoid genes, whereas CLPs expressed 45% of lymphoid (T-, B-, and NK-affiliated) genes, but not myeloid genes. Hence, co-expression of myeloerythroid genes (myeloid promiscuity) was observed to exist in HSCs, MPPs, and CMPs, whereas co-expression of T/B/NK lymphoid genes (lymphoid promiscuity) existed mainly in MPPs and CLPs. This data strongly suggest that myeloid and lymphoid promiscuity is distributed in a hierarchical and asymmetrical fashion during hematopoietic development and, therefore, the expression of lineage-related genes can precede commitment (FIGS. 2, 3, 4, and 5).

### Example 18

[0176] Because groups of genes with similar expression behavior (up-regulation or down-regulation under the same condition) are likely to be functionally related, the relative expression patters of genes were compared within these populations. Among a variety of clustering methods [including self-organization maps (SOMs) and hierarchical clustering], K-means clustering, which uses genes with known functions as initial seeds for clusters, was determined to be most appropriate. This was described in Example 12. There were 137 known genes picked, the biologic functions of which have been well characterized, as the initial seeds. A total of 4,863 genes that passed the initial screening filter were subjected to further analysis. The expression levels of these genes were first standardized (or normalized) and then analyzed by K-means clustering using Minitab data analysis software. The final partition of the 4,863 genes/ESTs resulted in 100 clusters, shown in Table 3, each containing a different number of genes. Genes that were dominantly expressed in each population were the primary focus, grouping them into four sub-population categories (FIG. 4, Table 1).

[0177] The clustering analysis revealed again that the majority of nonhematopoiesis-affiliated genes fell into the group listed in FIG. 4A. The group of FIG. 4A also contained genes that might play a role in the regulation of stem cell properties, such as self-renewal. These include Wnt1, desert hedgehog (DHH), TCF3 (a target of Wnt signaling), and Smoothened (SMO, a coreceptor of DHH), which are potentially involved in maintaining stem cell compartments. Genes related to cell growth arrest (e.g., gut-enriched Kruppel-like factor and ZFP36), immortalization of cells (e.g., Bmi-1, a polycomb-group protein), leukemogenesis (e.g. HoxA9 and Meis1), and commitment (e.g. Manic Fringe [Notch activity regulator]) were also found in this category.

[0178] It was found that 13.8% of the genes (n=4,863) were significantly up-regulated in MPPs but maintained at various levels in CLPs and CMPs (genes of FIG. 4B). These included 26% of hematopoietic (both myeloid and lymphoid) genes, which were elevated at the MPP stage. Thus, MPPs co-express genes related to multiple myeloid and lymphoid lineages (FIGS. 4C-D), suggesting that both myeloid and lymphoid promiscuity may operate at this stage. Other known genes in this category include regulatory molecules of cell cycling, such as cyclins, CDC molecules, and cell cycle checkpoint molecules (BRCA, MAD2, etc.). Several kinases related to cell proliferation, such as Nek2, Sak-b (a homolog to Drosophila Polo) and Esk were also found in this category. This data is compatible with the fact that MPPs are highly proliferative cells (FIG. 1B) and suggest that MPPs are at a priming stage for both myeloid and lymphoid differentiation.

[0179] The majority of genes preferentially expressed in CLPs (41% of hematopoietic-related genes in FIG. 4C) and CMPs (25% of hematopoietic-related genes, genes in FIG. 4D) were lymphoid and myeloid genes, respectively (Table 2, FIG. 4). Genes in FIG. 4C included B, T, and NK lymphoid-associated genes (i.e., E2A, Ikaros, HES-1, Notch1, GATA-3, BLNK, TCRβ, TCRγ, CD94, TdT, RAG-1, B lymphoid kinase, Lck, and IL-7R), whereas genes in FIG. 4D included granulocyte/monocyte- and megakaryocyte/erhthrocyte-affiliated genes (i.e., GATA-1, C/EBPα, β, and δ, LMO4, FOG, and IL-11R, G-CSFR, GM-CSFR). Interestingly, the majority of the genes categorized in categories C and D are likely to be reciprocally regulated between CLPs and CMPs, representing the myeloid-versus-lymphoid branch point. This result suggests that transcriptional regulation of lymphoid-affiliated (T, B, and NK lineages) or myeloid-affiliated (MegE and GM lineages) genes is a mutually exclusive event in the progression from MPPs to either CLPs or CMPs.

[0180] In addition to mutually exclusive regulation in the expression of lymphoid-versus myeloid-related genes, a number of genes were up-regulated at the CLP (FIG. 4C) or CMP stage (FIG. 4D) as a result of transition from the MPP stage. These genes encode molecules related to cell differentiation and functions, such as lymphoid-related Lck, λ5, TdT, RAG-1, and myeloid-related LIM and SH3 protein 1, LMO4, SDR1, macrophage inflammatory protein (MIP), and small inducible cytokine A9. This indicated that up-regulation of lineage-affiliated genes was also required for lineage specification.

[0181] A method for associating a gene with a stem cell sub-population can be practiced. The method is initiated by isolating a population of bone marrow stem cells or the populations that have more than one-cell population. The population is separated into sub-populations. The RNA from each said sub-population is then isolated. A clonogenic library is formed from the RNA. The library is directed to genes expressed in the sub-population.

[0182] The library is then amplified. Gene expression patterns for each sub-population of cells are analyzed with a bioinformatics program by hybridizing with the clonogenic library labeled ESTs. Expression is indicated if an EST attaches to a member of the library. Expressed genes are associated with the sub-populations to build a gene expression map. Next, a gene of unknown function is isolated, with the gene's expression in each sub-population determined. This information is compared with said expression patterns from the sub-population. Based on when the gene is expressed, it is associated with a particular sub-population, and the gene's function can be predicted.

### Example 20

[0183] A method for determining a cell sub-population comprising: isolating a population of hematopoietic stem cells; separating said population of stem cells into sub-populations; isolating RNA from each said sub-population; forming a clonogenic library from said RNA directed to genes expressed in said sub-population for each said sub-population and amplifying said library; analyzing gene expression patterns of each said sub-population of cells with a bioinformatics program by hybridizing with said clonogenic library, labeled ESTs, whereby expression is indicated if an EST attaches to a member of said library; associating expressed genes with the sub-populations to build a gene expression map; isolating a cell of unknown function; analyzing said cell's gene expression with said bioinformatics program to determine the gene expression pattern; comparing said unknown cell with said expression patterns from said sub-populations; and, based on said cell's expressed genes, associating said cell with a particular sub-population.

### Example 21

[0184] A method is described wherein cell stage commitment from an unknown multilineage-affiliated cell can be identified and characterized. The method is initiated by isolating and amplifying the nucleic acid from an unknown cell.

[0185] An unknown hematopoietic cell is isolated as provided in Example 1. Approximately equal amounts of biotinylated cRNA derived from replicate wells of each unknown cell, HSC, MPP, CMP, and CLP cell sub-population may be mixed with antisense biotinylated control cRNA (bioB, bioC, bioD, and cre) and then individually hybridized with the gene matrix, and incubated with strepavidin-conjugated phycoerythrin (PE) complex to detect the hybridization signal intensity, which is an indicator of gene expression level for each corresponding gene on the various gene expression maps.

[0186] Replicate hybridization results have been obtained for HSCs, MPPs, CMPs, and CLP sub-populations and were described previously herein. The chip is washed, stained, scanned for detection of phycoerythrin (PE) label, and normalized to enable comparison of data between chips to eliminate chip-to-chip variability, following standard protocol, well known to those in the art. See generally, Lockhart et al. 1996; Affymetrix GeneChip (R) Expression Analysis Technical Manual, Rev. 3 (2002). In this procedure, replicate signal intensity mean, standard deviation, and standard error measurements are computed for each of the various cell sub-populations by standard software analysis. These gene expression maps may be used to identify individual unknown cells that correspondingly express genes characteristic of pinpointed cells on the HSC -> MPP -> CMP, CLP hematopoietic cell differentiation pathway gene expression map.

[0187] As detailed in Example 12, the procedure for grouping expressed genes into clusters for each of the HSC, MPP, CMP, and CLP populations involved utilization of (1) Affymetrix analysis software, (2) Prescreening using a screening filter, and (3) K-means clustering.

[0188] FIG. 4 shows hybridization results with the majority of genes with expression levels of more than 200. A standardized, normalized gene expression level was computed to be equal to an expression level of a gene minus the mean of the expression level of the CD45+ HSC gene. All of the gene expression level changes, depicted as standard deviation color codings in FIG. 4, were translated into normalized values such that each of the means for the corresponding genes were given an assigned value of zero (“0”), with a measured standard deviation about that mean.

[0189] Normalized gene expression level changes were categorized into the following standard deviation groups: −1.5 to −0.75; −0.75 to −0.50; −0.50 to −0.25; −0.25 to 0.0; 0.0 to 0.25; 0.25 to 0.50; 0.50 to 0.75; 0.75 to 1.5. Importantly, a negative standard deviation (e.g., −1.5) indicates a very low level of expression variability relative to the expression of this particular gene under other conditions, rather than “no expression” of that gene. Note that these levels represent eight ranks. Thus, the gene expression data in FIGS. 4 and 5 may also be placed into relative ranks of −4, −3, −2, −1, 1, 2, 3, and 4.

[0190] The gene expression map with its associated gene expression level standard deviation changes for the unknown cell may be compared to the standardized gene expression maps of the HSC, MPP, CMP, and CLP sub-populations. The unknown cell can then be associated with one of these four sub-populations. Moreover, the unknown cell can be placed in a transition cell category where the unknown cell manifests gene expression characteristic of an HSC-MPP, MPP-CMP, or MPP-CLP transition cell. A typical cells (e.g., leukemia cells, tumor cells, non-hematopoietic cells) that express genes of the HSC, MPP, CMP, and/or CLP sub-populations may also be characterized by comparison with the four sub-population gene expression patterns. As more data is accumulated regarding hematopoietic transition cells, these known cells can be used as provided standard sub-populations permitting characterizations of their respective hematopoietic cell differentiation pathways.

### Example 22

[0191] A gene matrix can be constructed by adhering and affixing isolated genes and expressed sequence tag (EST) cluster nucleic acid sequences from the cell sub-populations in a particular tissue lineage pathway onto a solid phase matrix or support. Suitable multilineage cell tissue can include but are not limited to hematopoietic, nerve, muscle, kidney, and liver. The Affymetrix.RTM.417.TM. Arrayer and 427.TM. Arrayer can be used to deposit densely packed nucleic acid arrays on glass slide matrixes. See U.S. Pat. Nos. 6,040,193 and 6,136,269, incorporated by reference in their entireties herein. Suitable solid phase matrices that can be used are silica or silica-based materials, inorganic glass, functionalized glass, polymers, plastics, resins, polysaccharides, carbon, metals, polymerized Langmuir Blodgett film, Si, Ge, GaAs, GaP, SiO.sub.2, SiN.sub.4, polytetrafluoroethylene, polyvinylidenedifluoride, polystyrene, polycarbonate, or combinations thereof.

[0192] Glass slides can be pretreated with an alkaline bath consisting of 1 liter of 95% ethanol with 120 ml of water and 120 grams of sodium hydroxide for 12 hrs. Slides are washed under running water and allowed to air dry, then rinsed again with 95% ethanol. Slides can be aminated with 0.1% amino propyl-triethoxysilane for the purpose of attaching amino groups to the glass surface. Slides are exposed to the amination solution for about 5 minutes at ambient temperature on a rotary shaker. Subsequently, slides are removed and rinsed three times with 100% ethanol.

[0193] Slides are placed in 110°-120° C. vacuum oven for 20 min., then cured at room temperature for 12 hrs in an argon environment. Slides are dipped in a dimethylformamide (DMF) solution, followed by thorough washing with methylene chloride. The aminated slide surface is exposed to a 30 mM solution of NVOC-GABA (gamma amino butyric acid) NHS (N-hydroxysuccinamide) ester in DMF to attach a NVOC-GABA protective moiety to each of the amino groups. The surface is washed with a DMF, methylene chloride, and ethanol mixture. Unreacted aminopropyl silane on the glass surface are capped with acetyl groups to prevent further reaction by exposure to a 1:3 mixture of acetic anhydride in pyridine for 1 hr. Slides are washed again in DMF, methylene chloride and ethanol.

[0194] Light from an Hg—Xe arc lamp can be imaged onto the glass surface through a laser-ablated chrome-on-glass mask in direct contact with the surface. The glass surface is exposed to 5 min. illumination with 12 mW of 350 nm broadband light to activate amino groups by photolysis. Then, nucleic acid sequences are placed in contact with the slide, washed as previously, and dried for use in assays. In this manner, separate gene arrays for each cell sub-population in a multilineage differentiation pathway can be created for subsequent characterization of sub-populations. Alternatively, the gene arrays for all sub-populations of cells associated with a multilineage pathway can be placed on the same slide matrix. Affymetrix GeneChip MU-U74 (version 2—arrays A and B (Affymetrix, Santa Clara, Calif.) also can be used.

### Example 23

[0195] The method of Example 21 can be utilized for the construction of a nucleic acid library solid phase matrix or support. Specifically, a separate glass solid phase matrix can be constructed containing a library of nucleic acid sequences associated with HSC, MPP, CMP, or CLP genes. A glass matrix can be prepared that contains solely HSC nucleic acid sequences selected from a group consisting of SEQ. ID. NOs. 3428-4863. A second glass matrix can be made that contains only MPP sequences selected from a group consisting of SEQ. ID. NOs. 2076-3427. A third glass matrix can be prepared that contains only CMP sequences selected from a group consisting of SEQ. ID. NOs. 822-2075. A fourth glass matrix can be made that contains only CLP sequences selected from a group consisting of SEQ. ID. NOs. 1-821.

[0196] Solid phase matrices can also be constructed that include nucleic acid sequences associated with a combination of hematopoietic cell sub-populations. A fifth glass matrix can be prepared that contains HSC and MPP sequences selected from a group consisting of SEQ. ID. NO. 2076-4863. A sixth glass matrix can be prepared that contains MPP and CMP sequences selected from a group consisting of SEQ. ID. NOs. 822-3427. A seventh glass slide can be made that contains MPP and CLP sequences selected from a group consisting of SEQ. ID. NOs. 1-821 and 2076-3427. An eighth glass slide can be prepared that contains HSC, MPP, CMP, and CLP sequences selected from a group consisting of SEQ. ID. NO. 1-4863.

### Example 24

[0197] Computer data analysis, depicted in FIGS. 2-5, has been performed which involves the following steps: collecting a known or unknown cell's gene expression data; computing Pearson's correlation coefficient to obtain the similarity/difference distances between the cell's genes; determining the number of expressed genes; normalizing data to permit comparisons of gene expression levels between genes; performing K-means clustering on normalized data to define gene clusters; creating gene expression maps; and visualizing the maps using graphical or color bar representations.

[0198] The gene expression data collected are obtained from processed instrument signal readings of collected photons emanating from excited fluorescence of phycoerythrin-labels (PE-labels). These PE-labels are operably bound to each of the cell's cRNA probes that correspondingly hybridize and attach to each of the nucleic acids on the solid phase array matrix as described in Examples 6-10. Computer software converts the raw hybridization intensity signal readings to expression levels for each particular gene based on the comparison between the hybridization signals of perfect match and mismatch pairs among a number of nucleic acid sequences (e.g., 15-20) which characterize that given gene.

[0199] Negative values are converted to positive values by the software to facilitate further data processing. Thus, all negative values were converted to a positive 20, using 20 as the background level. Other background level numerical values, different from “20,” may be also be chosen. Pearson's correlation coefficient (PCC) determination was performed for genes of HSC, MPP, CMP, and CLP cell sub-populations using the converted numerical data to obtain gene similiarity/difference distance determinations such as those obtained in FIG. 1A. The greater the computed distance between two genes, the greater the difference between those two genes. Thus, FIG. 1A shows that the distance between HSC and MPP is 0.951. The distance between MPP and CLP is 0.935. The distance between MPP and CMP is 0.930. The distance between HSC and CLP is 0.900. The distance between HSC and CMP is 0.866.

[0200] Prior to K-means clustering analysis, the computer software defines an “expressed gene.” An “expressed” gene is defined by the software as an expression level of a given gene being more than 100. However, other expression levels may be chosen. The expression data for each “expressed gene” is then subjected to a software screening filter that selects certain expressed genes based upon pre-established filtering criteria. The filtering criteria used required (1) an absolute difference of gene expression level of greater than 100, and (2) and a fold-change of expression level for each gene of greater than 2-fold. Other filtering criteria may be used. 4863 expressed genes were obtained using these filtering criteria.

[0201] After the filtering criteria are applied, the computer software normalizes the gene expression data. A normalized or standardized gene expression level is equal to the following ratio: (an expression level of a gene minus the mean of the expression levels of this gene) divided by the standard deviation (s.d.) of the expression level of this gene. Expression levels for all the genes are normalized such that each mean is brought to a zero (0) value to permit comparisons of the standard deviations, as a measure of gene expression level variability or change. Thus, genes expressed in different sub-populations of cells can be compared by utilizing normalized standard deviation data that quantitate expression level variability.

[0202] Computer software-generated K-means clustering analysis is then performed on normalized standard deviation gene expression change data. The K-means clustering method groups genes together according to their similarity as previously discussed in Example x. Gene clusters created by this method include, but are not limited to, the 100 gene clusters of FIGS. 4 & 5, and Tables 1 & 3, and the clusters 1-8 of Table 4 and FIG. 8. Standard deviation ranges for each gene were categorized by the software into following ranges: −1.5 to −0.75, −0.75 to −0.50, −0.50 to −0.25, −0.25 to 0.0, 0.0 to 0.25, 0.25 to 0.50, 0.50 to 0.75, 0.75 to 1.5. Ranks of the standard deviation ranges can also be expressed as follows: rank 1=−1.5 to −0.75, rank 2=−0.75 to −0.50, rank 3=−0.50 to −0.25, rank 4=−0.25 to 0.0, rank 5=0.0 to 0.25, rank 6=0.25 to 0.50, rank 7=0.50 to 0.75, and rank 8=0.75 to 1.5.

[0203] The categorized gene clusters and their corresponding normalized gene expression data, expressed as standard deviations or ranks, are then utilized to create computer-generated gene expression maps corresponding to the gene clusters expressed in various cell sub-populations. Spotfire software was used to display graphical representations and color bar representations of the gene expression level change data corresponding to each gene within a gene cluster. Other software can developed or obtained to display representations of the gene expression level change data. Thus, computer-generated gene expression maps were obtained for genes expressed in HSC, MPP, CMP, and CLP sub-populations.

[0204] Representative computer software-generated gene expression maps are depicted in FIGS. 2, 3 and 4 in color bar form, and FIG. 5 in graphical form. FIG. 5 shows a graphical representation of the gene expression data. The vertical axis represents normalized gene expression standard deviation values, and the horizontal axis represents discrete HSC, MPP, CLP, and CMP sub-populations. FIG. 5 contains four separate graphs, labeled as FIG. A, B, C, and D. Each graph corresponds to a different gene cluster that contains genes possessing a similar expression pattern. FIG. 4 shows a computer software-generated color bar representation of the same gene expression data as that depicted in FIG. 5. FIG. 4A, 4B, 4C, and 4D show gene fingerprint color pattern maps that characterize gene expression for the HSC, MPP, CLP, and CMP sub-populations.

### Example 25

[0205] FIG. 8 and Table 4 show results of data from representative clusters 1 through 8, wherein the genes in each respective cluster are divided into groups that possess characteristic up-regulated and down-regulated gene expression patterns. For example, Cluster 1 includes a group of genes that are down-regulated in MPP as compared to HSC. The Cluster 1 grouping of down-regulated genes had MPP vs HSC fold changes ranging between −5 and −2. Cluster 1 includes the following genes: AML-1, CCAAT, Gut enriched Kruppel-like factor, Jun-B, Transcription factor LRG-21, Zinc finger protein 36, FMS-like tyrosine kinase 3, Phosphalidylinositol 3-kinase regulatory subunit, Ly-6E. 1 alloantigen, N10 a nuclear hormonal binding receptor, Flamingo 1, Notch-1, Cathepsin S, Retinol binding protein 1, cellular, Fibroblast growth factor 4, Small inducible cytokine A3, TGF beta-induced protein, 68 kDa, and PAC-1. When the normalized standard deviation value obtained for the AML-1 gene was compared in the MPP cell subpopulation vs. the HSC cell sub-population, the computed ratio was −2.4, indicating greater expression in the HSC sub-population in comparison to the MPP sub-population.

[0206] The Cluster 2 grouping of up-regulated genes had MPP vs. HSC fold changes ranging between 2.0 and 6.7. Cluster 2 includes the following genes: HNF-6, CDC28, JAK2, nek2, sak-b, Serine/threonine kinase 6, CD48 antigen, Male enhanced antigen 1, Acetyltransferase Tubedown-1, BMP-4, Wnt10a, Caspase-3, Cathepsin G, Hsp70, T-IAP, BUB1, Cell division cycle control protein 2a, Cyclin A2, Cyclin B1, Cyclin B2, Cyclin F, Kinesin-related mitotic motor protein, Mitotic centromere-associated kinesin, Mitotic checkpoint component Mad2, BUB1B, Rab6kill, RFC4, TERF2, Chemokine (C—C) receptor 1-like, Crlf1, FGF-2, Small inducible cytokine A9, DDX3, elF4B, Snrp116, Karyopherin (importin) alpha 2, and HMG4. The The Cluster 3 grouping of down-regulated genes had CLP vs MPP fold changes ranging between −16.8 and −2.2, and CMP vs MPP fold changes ranging between −17.9 and −2. Cluster 3 includes the following genes: ATF-4, COPEB, egr1, Jun-D, Transcription factor LRG-21, Zinc finger protein 36, RGS2, Male enhanced antigen 1, BMP-4, RhoB, Slpi, FGF-2, EEF-Tu, mEAR-1, and Ear3.

[0207] The Cluster 4 grouping of up-regulated genes had CLP vs MPP fold changes ranging between 2 and 14.2, and CMP vs MPP fold changes ranging between 2 and 7. Cluster 4 includes the following genes: CTCF, Bromodomain adjacent to zinc finger domain, 2A, CDC45-related protein, Cbfa1/Osf2/Runx2, Foxm1, Ikaros DNA binding protein, LIM-only domain transcription factor LMO-4, Mad4, Nmi, RelA, pOU domain, class 2, transcription factor 1, Taube nuss, Zfp265, JAK3, Chk2, RAN GTPase activating protein 1, Krev-1, MNBH, Smad4, STAT6, CD164, CD1d1 antigen, CD44 antigen, Fibronectin receptor beta-chain, Inositol trisphosphate receptor type 2, Ly86, Sra1, Gcdp, Notch-1, Napor-3, BH3 interacting domain death agonist, Caspase-3, Caspase-6, Caspase-8, Catalase, Hypoxia inducible factor 1, alpha subunit, Cyclin-dependent kinase homologue, mutant p53, Myb proto-oncogene, Myelocytomatosis oncogene, RAB9, member RAS oncogene family, Retinoblastoma-like 1, Lcr-1 (CXCR-4 homologue), Stromal cell derived factor receptor 1, Interferon (alpha and beta) receptor, and Phosphatase and tensin homolog.

[0208] The Cluster 5 grouping of down-regulated genes had CLP vs CMP fold changes ranging between −76.6 and −3.4, and CLP vs MPP fold changes ranging between −25.0 and −2. Cluster 5 includes the following genes: FOG, GATA-binding protein 1, GATA-binding protein 2, LIM-only domain transcription factor LMO-2, Apolipoprotein E, G-protein coupled thrombin receptor, Trfr2, Tyrosine kinase receptor 1, Cathepsin G, Myeloperoxidase, Proteinase3, Spi2 proteinase inhibitor, Retinol binding protein 1, cellular, Small inducible cytokine A9, and Neutrophil elastase.

[0209] The Cluster 6 grouping of up-regulated genes had CLP vs CMP fold changes ranging between 2 and 125.3, and CLP vs MPP fold changes ranging between 2.1 and 44.7. Cluster 6 includes the following genes: bHLH, B-cell-specific coactivator BOB.1/OBF.1, AML-1 (Cbfa1/Osf2/Runx2), Ikaros DNA binding protein, Inhibitor of DNA binding 2, Tcf7, Tusp, Cytochrome c oxidase subunit VlaH, B lymphoid kinase, FMS-like tyrosine kinase 3, Intracellular calcium-binding protein (MRP14), Intracellular calcium-binding protein (MRP8), Limk1, Rearr. lymphocyte protein-tyrosine kinase, Smad7, B cell linker protein BLNK, Interleukin 7 receptor, Interleukin-18 receptor accessory protein-like, Lymphocyte antigen 6 complex, locus D, NK cell receptor 2B4, Putative transmembrane receptor IL-IRrp, Hairy and Enhancer of Split 6, Notch-1, Cathepsin S, Pre-B lymphocyte 1, Rag-1, Rag-2, T-cell receptor beta-chain constant region, Tdt, Interleukin 12a, Lymphotoxin-beta, and Small inducible cytokine A5.

[0210] The Cluster 7 grouping of down-regulated genes had CMP vs CLP fold changes ranging between −31.7 and −2.1, and CMP vs. MPP fold changes ranging between −4.8 and −2.2. Cluster 7 includes the following genes: Gut enriched Kruppel-like factor, TGF-beta-stimulated clone-22, Cbp, Intracellular calcium-binding protein (MRP14), GABA-A, N10 a nuclear hormonal binding receptor, and Frizzled homolog B (Drosophila). The Cluster 8 grouping of up-regulated genes had CMP vs CLP fold changes ranging between 2 and 76.6, and CMP vs MPP fold changes ranging between 2 and 6.9.

[0211] Functional category definitions for each of the genes are indicated as follows: A=transcription, B=metabolism, C=signal transduction, D=antigens and receptors, E=development, F=cytoskeleton, G=apoptosis, stress, inflammation, H=cell cycle, proliferation, I=immune response, J=cytokines and growth factors, K=protein modification, interaction, L=channels and transporters, M=extracellular matrix and adhesion, N=RNA processing, O=intracellular trafficking, P=chromatin modification, DNA repair, Z=unclassified. In addition, positions of up-regulated and down-regulated genes clusters 1-8 are depicted in FIG. 8.

### Example 26

[0212] Single-cell RT-PCR amplification was executed using a procedure modified from that of Hu M, Krause D, Greaves, et al. Genes Dev. 1997; 11:774-785. Single HSC, MPP, CMP, and CLP cells were isolated to obtain amplified targeted gene sequences for analysis. In this modified procedure, (1) Single murine bone marrow-derived HSC, MPP, CMP, and CLP cells were directly triple FACS sorted, micromanipulated or otherwise deposited individually into 96 well arrays of 0.2 ml microamp tubes, and (2) the lysis buffer preferably contained 0.5% Triton X-100 buffer instead of 0.4% NP-40 buffer. After deposition of single cells into the 96 well arrays of microamp tubes and cell lysis, HSC, MPP, CMP, and CLP-derived nucleic acid molecules from each single cell are separately amplified in individual wells by the following PCR method.

[0213] Individual cells from murine bone marrow are sorted by FACS or micromanipulated into 96-well plate arrays of 0.2 ml microamp tubes containing cell lysis buffer. The accuracy of the flow sorting or micromanipulation was verified by microscopic examination of the single cells deposited into each of the 96 wells on the plate. A reverse transcriptase protocol was then performed using gene-specific primers for all the genes, ESTs and gene regions of interest. The genes, ESTs, and gene fragments used may be any identified genes of HSC, MPP, CMP, and CLP. These genes include, but are not limited to, those genes depicted in FIG. 2, FIG. 3, and FIG. 4, SEQ ID NOs. 1-4863, cumulative clusters 1-100, and representative clusters 1-8.

[0214] First round PCR was performed using 3′ gene-specific forward and reverse primers, wherein these primers include a spanned length of at least one intron. Primers were made for HPRT, MHCII.2A, ESK, and CyclinA2 tested genes. The housekeeping HPRT transcripts were used as a control to monitor the success and efficiency of the RT-PCR reaction. Aliquots of the first round PCR reaction are subsequently replicated into replicate plates. Second round PCR reactions were then performed separately for each gene with fully nested primer pairs. Upon completion of the second round PCR reactions, aliquots were subjected to agarose gel electrophoresis and visualized by ethidium bromide staining. Single cell RT-PCR results obtained are shown in FIG. 6. In FIG. 6ii, a table of the ratio of tested genes to internal HPRT control is presented for each of the HPRT, MHCII.2A, ESK, and Cyclin A2 genes. Thus, 57 HSC wells and 68 MPP wells were determined to be positive for the HPRT housekeeping control gene. For the MHCII.2A gene, 40 of 57 HSC individual cells expressed the target gene, whereas only 16 of 68 MPP cells expressed that same gene. Similarly the ESK gene was preferentially expressed in 36/68 MPP cells, as compared to lack of expression (0/57) manifested by the HSC cells.

[0215] FIG. 6i. depicts microarray results for the MHCII.2A, ESK, and CyclinA2 genes among HSC, MPP, CLP, and CMP individual cells. Results are expressed as numerical scores indicating relative measured gene expression intensity levels. For an HSC cell, the MHCII.2A gene was expressed at higher levels (329) than either the ESK (41) or CyclinA2 (69) genes. In contrast, for an MPP cell, CyclinA2 (500) was expressed at a higher level than ESK (196), which was correspondingly expressed at a higher level than MHCII.2A (83). As with the MPP cell, a CMP cell exhibited a nearly identical graded expression pattern for CyclinA2 (430), ESK (204), and MHCII.2A (76) gene markers. However, a CLP cell exhibited a reduced gene expression signal pattern for CyclinA2 (273), ESK (166) and MHCII.2A (20) genes respectively.

[0216] FIG. 6iii shows a representative agarose gel that visualizes the electrophoretic patterns for HPRT, MHCII.2A, CyclinA2, and ESK genomic bands. The HPRT cDNA-derived PCR product is 249 bp, the MHCII.2A cDNA-derived PCR product is 198 bp, the CyclinA2 cDNA-derived PCR product is 200 bp, and the ESK cDNA-derived PCR product is 197 BP. Gene expression for individual cells was characterized by deposition of cDNA-derived PCR products into separate gel lanes. HPRT gene expression was found in HSC lanes 1-7, 10, and 12; and in MPP lanes 1, 2, 4, and 6-10. MHCII.2A gene expression was detected in HSC lanes 3-10 and MPP lanes 9-11. CyclinA2 expression was observed in HSC lanes 2, 3, 5, 6, and 8-11. ESK expression was obtained in MPP lanes 1, 2, 4-11.

### Example 27

[0217] A hematopoietic cell differentiation test kit can be constructed that contains the following components: a container, a hematopoietic cell microarray or an Affymetrix GeneChip MU-U74 Array A and B; a 96-well microtiter plate array of 0.2 ml microamp tubes; fluorescence-labeled (e.g., fluorescein, rhodamine) monoclonal antibodies to HSC, MPP, CMP, and CLP markers (e.g., Thy-1, Sca-1, Lin); four sets of Dynabead packed affinity columns for purification of HSC, MPP, CMP, and CLP cells, respectively; biotinylated RNA probe positive control standards which specifically bind to HSC, MPP, CMP, and CLP regions on the arrays; preserved HSC, MPP, CMP, and CLP control cell lysates; gene specific primers for at least four genes corresponding to each four sub-populations of cells for RT-RNA replication, R-phycoerythrin-conjugated streptavidin; antisense biotinylated control cRNA (bioB, bioC, bioD, and cre); a HPRT RNA transcript positive control for RT-PCR reactions, biotin-N-hydroxysuccinimide ester; biotinylated-cRNA controls for HSC, MPP, CMP, and CLP sub-populations, Qiagen RNAeasy columns, lysis buffer containing 0.5% Triton X-100, ethidium bromide stain for electrophoresis, reference gene expression maps for HSC, MPP, CMP, CLP sub-populations and transition cells; and computer software for data analysis.

[0218] The kit's included computer software can perform the following functions: conversion of raw hybridization intensity data into gene expression levels based on computation between hybridization signals of perfect match and mismatch pairs; conversion of negative values to positive values; computation of “expressed” gene numbers, based on establishment of a minimum expression level; Pearson correlation coefficient computation for gene distance similarities and differences; prescreening and selection of genes using a screening filter for subsequent clustering analysis; normalization of gene expression level standard deviation results; K-means gene clustering for grouping of cumulative clusters 1-100 of Table 3 and representative clusters 1-8 of Table 4; conversion of normalized gene expression standard deviation results to graphical representation, and color fingerprinting among cell sub-population categories utilizing Spotfire visualization of gene expression map fingerprint patterns.

[0219] The kit user will provide a FACS sorter or micro-manipulator for separation and purification of hematopoietic cells and deposition into tubes of 96 well plate arrays; hematopoietic cells to be characterized; fluorescence detection instrumentation; Dulbecco's MEM or RPMI-1640 culture media; HEPES, cell buffers; micro-pipettors and tips; electrophoresis apparatus; and agarose gels.

### Example 28

[0220] The foregoing test kit can be used in characterization of both unknown hematopoietic genes and unknown cells along the HSC to MPP to CMP/CLP differentiation pathways. Briefly, bone marrow, spleen, liver, lymph node, or other hematopoietic stem cell sources are separated by FACS sorting or Dynabead affinity column separation into HSC, MPP, CMP, and CLP sub-populations of interest. Upon separation, isolated cells from a specific sub-population (e.g., HSC-MPP transition cells) are placed individually in a 96 well microtiter plate array using either FACS instrument sorting or micromanipulation. The HSC-MPP transition cells are lysed in cell lysis buffer, and subjected to first and second round PCR amplification to obtain amplified cRNA copies of HSC and MPP genes of interest utilizing gene-specific forward and reverse primers. Lysates containing PCR amplified c-RNA copies of HSC, MPP, CMP, and CLP genes respectively can be included in parallel with the HSC-MPP transition cell lysates as positive controls.

[0221] The amplified cRNA from replicate wells derived from the HSC-MPP transition cell and the four sub-population control cells can be biotinylated with the biotin-NHS ester and mixed with antisense biotinylated control cRNA. Then the biotinylated-specific cRNA and/or the antisense control cRNA for each respective sub-population is hybridized with the nucleic acid sequences on the microarray or the Affymetrix GeneChip. Strepavidin-conjugated phycoerythrin is added to enable detection of the gene expression level for each corresponding gene on the HSC and MPP gene expression map. The reference gene expression map is created by use of the kit's software, as provided in Example 27. Characterization of the expression pattern of a plurality of genes (e.g., at least 5 genes) from the HSC-MPP transition cell will yield a gene expression fingerprint map that may include characteristics of the HSC positive control cell and the MPP positive control reference cell genes. The gene expression fingerprint map characterizing the HSC-MPP transition cell can be compared with the reference gene expression fingerprint maps obtained from both (1) the reference HSC and MPP sub-population cell lysates included in the aforementioned biotinylation procedure, and (2) the kit's biotinylated cRNA control reagents provided for corresponding reference HSC and MPP cell sub-populations. In addition, the HSC-MPP transition cell gene expression map may be compared against the kit's included printed version of the reference HSC, MPP, CMP, CLP, and transition cell gene expression maps.

[0222] In this manner, both the isolated individual HSC-MPP transition genes and transition cells that express these genes can be characterized and identified. Similarly, isolated individual MPP to CMP transition genes and cells, as well as MPP to CLP transition genes and cells, can be characterized and identified. Moreover, individual cells within the HSC, MPP, CMP, and CLP sub-population categories may be further characterized.

[0223] For characterization of a particular unknown HSC-MPP transition gene, amplified cRNA from the isolated HSC-MPP cell can be obtained and biotinylated. This is mixed with antisense biotinylated control cRNA and hybridized with nucleic acid sequences on the microarray. Strepavidin-conjugated phycoerythrin is added, and a light source excites fluorescence photon emission from the phycoerythrin label. The instrument's detector collects the emitted light photon signal and the instrument's software converts the raw photon data into gene expression intensity signal data. The instrument's software can further convert the unknown gene expression intensity signal data to normalized gene expression data expressed as a numerical standard deviation (s.d.) value. The software then compares the unknown gene expression numerical s.d. value for the same gene's expression numerical s.d. value in the control reference HSC, MPP, CMP, CLP, and transition cell sub-populations. Based upon the unknown gene's expression numerical s.d. value software then determines similarities or differences in comparison with the control reference cell values to characterize and identify the unknown gene. Moreover, when this gene characterization procedure is executed for a plurality of genes obtained from several HSC-MPP transition cells, the kit's software can be utilized to obtain groupings of gene clusters that characterize and identify a particular HSC-MPP transition cell sub-population.

[0224] For characterization of an isolated unknown transition cell, the above procedure can be followed for each individual gene. In this manner, an unknown transition cell's gene expression map may be constructed for a plurality of individual genes. As described previously, this unknown cell's gene expression map can be compared with the reference gene expression maps for known reference HSC, MPP, CMP, CLP, and transition cell sub-populations. Based upon these map comparisons, the unknown transition cell can then be characterized and identified.

### Example 29

[0225] Standardized or normalized gene expression level values were calculated from processed gene expression data. Expression level values for all genes were processed using fluorescence signal measurement mean and standard deviation values.

[0226] A normalized or standardized gene expression level value individually was computed according to the following formula:

Gene Expression Level Value=[(an expression level of a gene)−(the mean of the expression levels of this gene)]+(s.d. of the expression level of this gene)

[0227] In the above equation, the gene expression level value is computed to equal difference between the expression level of a gene and the mean expression level of the gene divided by the standard deviation of the expression level of the gene.

[0228] Expression level values for each of the genes characterized were normalized such that each gene's mean expression level value was brought to a zero (0) value. This is illustrated as follows, assume that a gene A initially possesses a mean expression level value of 100 units, with a standard deviation of 50 units (i.e., 100±50), and gene B initially has a mean value of 200 units, with a standard deviation of 100 (i.e., 200±100). After normalization, genes A and gene B each possess a mean expression level value of zero (0). However, gene A still has a standard deviation value of 50, and gene B has a standard deviation value of 100 (i.e., A=0±50, B=0±100).

[0229] This data normalization permits comparisons of the standard deviations between genes, as a measure of gene expression level variability or change. Thus, gene A's standard deviation of 50 is a lesser change than gene B's standard deviation of 100. Standard deviations for all the genes in a gene cluster or other gene grouping may be used to generate standard error measurements that may subsequently be used to compare the gene expression level changes obtained. Thus, genes expressed in different sub-populations of cells can be compared by utilizing normalized standard deviation data that quantitate expression level variability.

[0230] Thus, there has been shown and described a novel method for determining gene expression which fulfills all the objects and advantages sought therefor. It is apparent to those skilled in the art, however, that many changes, variations, modifications, and other uses and applications for the subject method are possible, and also such changes, variations, modifications, and other uses and applications which do not depart from the spirit and scope of the invention are deemed to be covered by the invention, which is limited only by the claims which follow.

### REFERENCE LIST

[0231] 1. Akashi, K., et al., Lymphoid development from stem cells and the common lymphocyte progenitors. Cold Spring Harb Symp Quant Biol, 1999. 64: p. 1-12.

[0232] Akashi, K., Traver, D., Miyamoto, T. and Weissman, I. L., A clonogenic common myeloid progenitor that gives rise to all myeloid lineages. Nature, 2000. 404 (6774): p. 193-7.

[0233] Avalos, B. R., The granulocyte colony-stimulating factor receptor and its role in disorders of granulopoiesis. Leuk Lymphoma, 1998. 28(3-4): p. 265-73.

[0234] Baylin, S., Tying it all together: epigenetics, genetics, cell cycle, and cancer. Science, 1997. 277(5334): p. 1948-9.

[0235] Biggs, W. H., 3^{rd} and W. K. Cavenee, Identification and characterization of members of the FKHR (FOX O) subclass of winged-helix transcription factors in the mouse. Mamm Genome, 2001. 12(6): p. 416-25.

[0236] Blum, S., R. E. Forsdyke, and D. R. Forsdyke, Three human homologs of a murine gene encoding an inhibitor of stem cell proliferation. DNA Cell Biol, 1990. 9(8): p. 589-602.

[0237] Brady, J. P. and J. Piatigorsky, A mouse cDNA encoding a protein with zinc-fingers and a KRAB domain shows similarity to human profilaggrin. Gene, 1994. 149(2): p. 299-304.

[0238] Busslinger, M., S. L. Nutt, and A. G. Rolink, Lineage commitment in lymphopoiesis. Curr Opin Immunol, 2000. 12(2): p. 151-8.

[0239] Chaudhary, P. M., Roninson I B, Expression and activity of P-glycoprotein, a multidrug efflux pump, in human hematopoietic stem cells. Cell, 1991. 66: p. 85-94.

[0240] Chen, X., et al., Kruppel-like factor 4 (gut-enriched Kruppel-like factor) inhibits cell proliferation by blocking G1/S progression of the cell cycle. J Biol Chem, 2001. 276(32): p. 30423-8.

[0241] Cheshier, S. H., Morrison, S. J., Liao, X. and Weissman, I. L., In vivo proliferation and cell cycle kinetics of long-term self-renewing hematopoietic stem cells. Proc Natl Acad Sci USA, 1999. 96(6): p. 3120-5.

[0242] Crosier, K. E., et al., Expression and functional analysis of two isoforms of the human GM-CSF receptor alpha chain in myeloid development and leukemia. Br J Haematol, 1997. 98(3): p. 540-8.

[0243] Dexter, T. M., M. A. Moore, and A. P. Sheridan, Maintenance of hemopoetic stem cells and production of differentiated progeny in allogeneic and semiallogeneic bone marrow chimeras in vitro. J Exp Med, 1977. 145(6): p. 1612-6.

[0244] Douville, E. M., et al., Multiple cDNAs encoding the esk kinase predict transmembrane and intracellular enzyme isoforms. Mol Cell Biol, 1992. 12(6): p. 2681-9.

[0245] Eaves, C., et al., Changes in the cytokine regulation of stem cell self-renewal during ontogeny. Stem Cells, 1998. 16 Suppl 1: p. 177-84.

[0246] Ema, H. and H. Nakauchi, Expansion of hematopoietic stem cells in the developing liver of a mouse embryo. Blood, 2000. 95(7): p. 2284-8.

[0247] Fode, C., et al., Sak, a murine protein-serine/threonine kinase that is related to the Drosophila polo kinase and involved in cell proliferation. Proc Natl Acad Sci USA, 1994. 91(14): p. 6388-92.

[0248] Ford, A. M., et al., Immunoglobulin heavy-chain and CD3 delta-chain gene enhancers are Dnase I-hypersensitive in hemopoietic progenitor cells. Proc Natl Acad Sci USA, 1992. 89(8): p. 3424-8.

[0249] Fortunel, N. O., A. Hatzfeld, and J. A. Hatzfeld, Transforming growth factor-beta: pleiotropic role in the regulation of hematopoiesis. Blood, 2000. 96(6): p. 2022-36.

[0250] Gong, S. G. and A. Kiba, The role of Xmsx-2 in the anterior-posterior patterning of the mesoderm in Xenopus laevis. Differentiation, 1999. 65(3): p. 131-40.

[0251] Hobert, O., et al., Isolation and developmental expression analysis of Enx-1, a novel mouse Polycomb group gene. Mech Dev, 1996. 55(2): p. 171-84.

[0252] Hu, M., et al., Multilineage gene expression precedes commitment in the hemopoietic system. Genes Dev, 1997. 11(6): p. 774-85.

[0253] Hume, D. A., et al., Regulation of CSF-1 receptor expression. Mol Reprod Dev, 1997. 46(1): p. 46-52; discussion 52-3.

[0254] Jacobs, J. J., et al., The oncogene and Polycomb-group gene bmi-1 regulates cell proliferation and senescence through the ink4a locus. Nature, 1999. 397(6715): p. 164-8.

[0255] Jiminez, G., et al., Activation of the beta-globin locus control region precedes commitment to the erythroid lineage. Proc Natl Acad Sci USA, 1992. 89(22): p. 10618-22.

[0256] Kautz, B., et al., SHP1 protein-tyrosinephosphatase inhibits gp91PHOX and p67PHOX expression by inhibiting interaction of PU.1, IRF1, interferon concensus sequence-binding protein, and CREB-binding protein with homologous Cis elements in the CYBB and NCF2 genes. J Biol Chem, 2001. 276(41): p. 37868-78.

[0257] Kim, M., et al., Rhodamine-123 staining in hematopoietic stem cells of young mice indicates mitochondrial activation rather than dye efflux. Blood, 1998. 91(11): p. 4106-17.

[0258] Kimura, S., et al., Hematopoietic stem cell deficiencies in mice lacking c-Mpl, the receptor for thrombopoietin. Proc Natl Acad Sci USA, 1998. 95(3): p. 1195-200.

[0259] Kiyono, T., Foster, S. A., Koop, J. I., McDougall, J. K., Galloway, D. A., Klingelhutz, A. J., Both Rb/p161NK4a inactivation and telomerase activity are required to immortalize human epithelial cells. Nature, 1998. 396(6706): p. 84-8.

[0260] Kondo, M., I. L. Weissman, and K. Akashi, Identification of clonogenic common lymphoid progenitors in mouse bone marrow. Cell, 1997. 91(5): p. 661-72.

[0261] Krull, C. a. K., R., Building from the bottom up. Nature Cell Biology, 2001. 3: p. 138-9.

[0262] Kuo, C. T. and J. M. Leiden, Transcriptional regulation of T lymphocyte development and function. Annu Rev Immunol, 1999. 17: p. 149-87.

[0263] Lagasse E., s. J., Uchida, N., Tsukamoto, A., Weissman I L, Toward Regenerative Medicine. Immunity, 2001. 14: p. 425-436.

[0264] May, G. a. E., T., The lineage commitment and self-reneal of blood stem cells. Chapter 5 in “Hematopoiesis—A developmental approach” Edited by Zon, L. I., 2001. Oxford University Press: p. 72-74.

[0265] Meraldi, P. and E. A. Nigg, Centrosome cohesion is regulated by a balance of kinase and phosphatase activities. J Cell Sci, 2001. 114(Pt 20): p. 3749-57.

[0266] Milner, L. A. and A. Bigas, Notch as a mediator of cellfate determination in hematopoiesis: evidence and speculation. Blood, 1999. 93(8): p. 2431-48.

[0267] Morrison, S. J. and I. L. Weissman, The long-term repopulating subset of hematopoietic stem cells is deterministic and isolatable by phenotype. Immunity, 1994. 1(8): p. 661-73.

[0268] Morrison, S. J. et al., Hematopoietic stem cells: challenges to expectations. Curr Opin Immunol, 1997. 9(2): p.216-21.

[0269] Okuda, T., van Deursen, J., Hiebert S. W., Grosveld, G., Downing, J. R., AML1, the target of multiple chromosomal translocations in human leukemia, is essential for normal fetal liver hematopoiesis. Cell, 1996. 84: p. 321-30.

[0270] Park, I., He, Y., Lin, F., Lacrum, O. D., Tian, Q., Bumgarner, R., Klug, C., Li, K., Kuhr, C., Doyle, M., Xie, T., Schummer, M., Sun, Y., Goldsmith, A., Clarke, M. F., Weissman, I. L., Hood, L. and Li, L., Differential Gene Expression Profiling of Adult Murine Hematopoietic Stem Cells. Blood, 2001. In press.

[0271] Porcher, C., Swat, W., Rockwell, K., Fujiwara, Y., Alt, F. W., Orkin, S. H., The T cell leukemia oncoprotein SCL/tal-1 is essential for development of all hematopoietic lineages. Cell, 1996. 86: p. 47-57.

[0272] Ray, D., et al., Characterization of Spi-B, a transcription factor related to the putative oncoprotein Spi-1/PU.1. Mol Cell Biol, 1992. 12(10): p. 4297-304.

[0273] Ray-Gallet, D., A. Tavitian, and F. Moreau-Gachelin, An alternatively spliced isoform of the Spi-B transcription factor. Biochem Biophys Res Commun, 1996. 223(2): p. 257-63.

[0274] Robb, L., Elwood, N. J., Elefanty, A. G., Kontgen, F., Li, R., Barnett, L. D., Begley, C. G., The scl gene product is required for the generation of all hematopoietic lineages in the adult mouse. EMBO J, 1996. 15: p. 4123-9.

[0275] Robey, E., Regulation of T cellfate by notch. Annu Rev Immunol, 1999. 17: p. 283-95.

[0276] Rolink, A. G. and F. Melchers, Precursor B cells from Pax-5-deficient mice-stem cells for macrophages, granulocytes, osteoclasts, dendritic cells, natural killer cells, thymocytes and T cells. Curr Top Microbiol Immunol, 2000. 251: p. 21-6.

[0277] Roose, J., et al., Synergy between tumor suppressor APC and the beta-catenin-Tcf4 target Tcf1. Science, 1999. 285(5435): p. 1923-6.

[0278] Rothenberg, E. V., J. C. Telfer, and M. K. Anderson, Transcriptional regulation of lymphocyte lineage commitment. Bioessays, 1999. 21(9): p. 726-42.

[0279] Roussel, M. F., Signal transduction by the macrophage-colony-stimulating factor receptor (CSF-1R). J Cell Sci Suppl, 1994. 18: p. 105-8.

[0280] Shimada, Y., et al., Asymmetric colocalization of Flamingo, a seven-pass transmembrane cadherin, and Dishevelled in planar cell polarization. Curr Biol, 2001. 11(11): p. 859-63.

[0281] Shivdasani, R. A., Orkin, S. H., The transcriptional control of hematopoiesis. Blood, 1996. 87: p. 4025-39.

[0282] Socolovsky, M., H. F. Lodish, and G. Q. Daley, Control of hematopoietic differentiation: lack of specificity in signaling by cytokine receptors. Proc Natl Acad Sci USA, 1998. 95(12): p. 6573-5.

[0283] Taipale, J. and P. A. Beachy, The Hedgehog and Wnt signaling pathways in cancer. Nature, 2001. 411(6835): p. 349-54.

[0284] Taylor, A. and K. Namba, In vitro induction of CD25 CD4 regulatory T cells by the neuropeptide alpha-melanocyte stimulating hormone (alpha-MSH). Immunol Cell Biol, 2001. 79(4): p. 358-67.

[0285] Tenen, D. G., et al., Transcription factors, normal myeloid development, and leukemia. Blood, 1997. 90(2): p.489-519.

[0286] Usui, T., et al., Flamingo, a seven-pass transmembrane cadherin, regulates planar cell polarity under the control of Frizzled. Cell, 1999. 98(5): p. 585-95.

[0287] Varnum-Finney, B., Xu, L., Brashem-Stein, C., Nourigat, C., Flowers, D., Bakkour, S., Pear, W. S., Bernstein, I. D., Pluripotent, cytokine-dependent, hematopoietic stem cells are immortalized by constitutive notchI signaling. Nat Med, 2000. 6(11): p. 1278-81.

[0288] Wang, Q., Stacy, T., Binder, M., Marin-Padilla, M., Sharpe, A. H., Speck, N. A., Disruption of the Cbfa2 gene causes necrosis and hemorrhaging in the central nervous system and blocks definitive hematopoiesis. Proc Natl Acad Sci USA, 1996. 93: p. 3444-9.

[0289] Watt, S. M., and Visser, J. W. M., Recent advances in the growth and isolation of primitive human haemopoietic progenitor cells. Cell Proliferation, 1992. 25: p. 263-297.

[0290] Weissman, I. L., Development switches in the immune system. Cell, 1994. 76: p.207-218.

[0291] Wolf, N. S., Kone, A., Priestley, G. V., Bartelmez, S. H., In vivo and in vitro characterization of long-term repopulating primitive hematopoietic cells isolated by sequential Hoechst 33342-Rhodamine 123 FACS selection. Exp Hematol, 1993. 21: p. 614-22.

[0292] Yang, Y. C., Interleukin-11 (IL-11) and its receptor: biology and potential clinical applications in thrombocytopenic states. Cancer Treat Res, 1995. 80: p. 321-40.

[0293] Youn, B. S., et al., A novel chemokine, macrophage inflammatory protein-related protein-2, inhibits colony formation of bone marrow myeloid progenitors. J. Immunol, 1995. 155(5): p. 2661-7.

The application's sequence listing, which the Patent Office published only in electronic form, follows.

SEQUENCE LISTING (4879 sequences)

SEQ ID NO: 1 - DNA, 465 bp, Mus musculus
  misc_feature (27)..(49): n = a, t, g, c
atcatgtagcagagggcactgggcctnnnnnnnnnnnnnnnnnnnnnnncatgtgaaaaatcctgatttccagctcatggagccagcgtttgaaccttgaacaaataaatttcatttatgattttctcatcaacattttctttgctctgtttgtagctgaatgttacatttttttaaaaatctctgttcaagccagaagagttgattatgagtggccacagcaaccctggcaagctgggccaaaaaatttcagtaggtcagtaatttaaacttcacatctggaaaaaaaattattaataatgtgaaacaaaccaacttaaaaagtgattcttgcacatgaattgtcacatattatatgtgttttttaaagagcctcagtctgactgatttcaaacactttttttctcctgtgtattgcttttaagagagccatcagttagctatcagaatctaggttgatgcatt

SEQ ID NO: 2 - DNA, 465 bp, Mus musculus; identical to SEQ ID NO: 1
  misc_feature (27)..(49): n = a, t, g, c

SEQ ID NO: 3 - DNA, 117 bp, Mus musculus
  misc_feature (43)..(43): n = a, t, g, c
caaggctagacttactgttaacttcagcctccacactattatntactttagcccagaaccagggcccaattatgggctcctcctcagctcctgccatgatatctgagcaaggttcag

SEQ ID NO: 4 - DNA, 117 bp, Mus musculus; identical to SEQ ID NO: 3
  misc_feature (43)..(43): n = a, t, g, c

SEQ ID NO: 5 - DNA, 191 bp, Mus musculus
ctaaatccatgttcggctgcttttcagaccaaaaccaaggcacaaagattgttgctattgtagatgccgacctggcctgttcttcaacctcagcctctgtattgacatctccagcccagaaccaggaatcagtaacttctttttctccagccttcggcatcttctcacaattgactccaacagatctaagg

SEQ ID NO: 6 - DNA, 191 bp, Mus musculus; identical to SEQ ID NO: 5

SEQ ID NO: 7 - DNA, 584 bp, Mus musculus
  misc_feature (52)..(52): n = a, t, g, c
  misc_feature (54)..(55): n = a, t, g, c
  misc_feature (64)..(64): n = a, t, g, c
  misc_feature (72)..(72): n = a, t, g, c
  misc_feature (81)..(81): n = a, t, g, c
  misc_feature (90)..(90): n = a, t, g, c
  misc_feature (93)..(95): n = a, t, g, c
  misc_feature (95)..(95): n = a, t, g, c
  misc_feature (114)..(114): n = a, t, g, c
  misc_feature (118)..(118): n = a, t, g, c
  misc_feature (121)..(121): n = a, t, g, c
  misc_feature (181)..(181): n = a, t, g, c
  misc_feature (185)..(185): n = a, t, g, c
  misc_feature (188)..(188): n = a, t, g, c
  misc_feature (245)..(245): n = a, t, g, c
  misc_feature (273)..(273): n = a, t, g, c
  misc_feature (311)..(311): n = a, t, g, c
  misc_feature (499)..(499): n = a, t, g, c
tgttgggccgttttgtcctggcccgtcgacatgtgctggctgcaggcttccntnntagtagatntcccatantatgaatgnctggatctnaantntgaatggcagaaaagcgcntacntcnaggacaagatgcgaaaagcaatggctgaggagctagccaaatgaccttacccatcagttnagantgntcccaaagacctgactgctcagggacccagcagtgagtgttgggcaggccagagttntcatccaacatcagagagattaactgtntctgtaggacgtggtcagagtagggggtgctcagcatntccaaggaacgggtggtcctaataaatcctttggtttggtggaagccagctatcttcccaggctctgtatctatctcctctctctcgtattttgcacacacatacatatcctcttccctagctctccaggattctaccgagtgggctctctttccccagctcccccataatgcctgtgtgctgtggcnagcagagcagggctgacttgagagacagaaaactgagacttaaatgggtagggtcctggacacttgagcttcctgggaaatgtac

SEQ ID NO: 8 - DNA, 584 bp, Mus musculus; identical to SEQ ID NO: 7
  misc_feature (52)..(52): n = a, t, g, c
  misc_feature (54)..(55): n = a, t, g, c
  misc_feature (64)..(64): n = a, t, g, c
  misc_feature (72)..(72): n = a, t, g, c
  misc_feature (81)..(81): n = a, t, g, c
  misc_feature (90)..(90): n = a, t, g, c
  misc_feature (93)..(93): n = a, t, g, c
  misc_feature (95)..(95): n = a, t, g, c
  misc_feature (114)..(114): n = a, t, g, c
  misc_feature (118)..(118): n = a, t, g, c
  misc_feature (121)..(121): n = a, t, g, c
  misc_feature (181)..(181): n = a, t, g, c
  misc_feature (185)..(185): n = a, t, g, c
  misc_feature (188)..(188): n = a, t, g, c
  misc_feature (245)..(245): n = a, t, g, c
  misc_feature (273)..(273): n = a, t, g, c
  misc_feature (311)..(311): n = a, t, g, c
  misc_feature (499)..(499): n = a, t, g, c

SEQ ID NO: 9 - DNA, 515 bp, Mus musculus
  misc_feature (36)..(36): n = a, t, g, c
  misc_feature (179)..(219): n = a, t, g, c
  misc_feature (340)..(354): n = a, t, g, c
  misc_feature (459)..(461): n = a, t, g, c
  misc_feature (463)..(465): n = a, t, g, c
  misc_feature (467)..(469): n = a, t, g, c
  misc_feature (471)..(478): n = a, t, g, c
  misc_feature (480)..(490): n = a, t, g, c
ctgtgtctgtcatgtctatctatgtggcctggcccnagttactctcaatagcaggttctcctgtggctggaaaggagactcacgcagctggagcctgctccacgcacagacctgcaaaggcaaaccacattttcactccagaggctgagcctggtgaagtccagtacacatctccacgnnnnnnnnnnnnnnnnnnnnnnnnnnnnnnnnnnnnnnnnnaagtcacacgcttccagatgtcactaacagttctctcactcagctgggtggcctgttctgtgccatctgcagatttgttgggtgtcacctctagaacaaaggttttttcttcccactgtcnnnnnnnnnnnnnnnaaaaccacgtcaatcaaatgcatactgagaatagatcataagaaaaattactttaaaataattctttggtatacaatgttatctattaaagacaaaagcaaatannngnnnannnannnnnnnnannnnnnnnnnntacatacagagttattcttcgtgga

SEQ ID NO: 10 - DNA, 515 bp, Mus musculus; identical to SEQ ID NO: 9
  misc_feature (36)..(36): n = a, t, g, c
  misc_feature (179)..(219): n = a, t, g, c
  misc_feature (340)..(354): n = a, t, g, c
  misc_feature (459)..(461): n = a, t, g, c
  misc_feature (463)..(465): n = a, t, g, c
  misc_feature (467)..(469): n = a, t, g, c
  misc_feature (471)..(478): n = a, t, g, c
  misc_feature (480)..(490): n = a, t, g, c

SEQ ID NO: 11 - DNA, 217 bp, Mus musculus
gctgttcttttctacgaccaattgatttccggccaacttggttcgcctgtctgagctttacgctatggtggcttgggggaaatggggtgtaaatgggtgttgaggttaacttgaatgagtagttctatatacgtaatgagccacggggtgtattatacctcaaggtttcttgaagtggtttaccctagaaagtacgagaattcagctgtcttgaatg

SEQ ID NO: 12 - DNA, 217 bp, Mus musculus; identical to SEQ ID NO: 11

SEQ ID NO: 13 - DNA, 215 bp, Mus musculus
  misc_feature (36)..(36): n = a, t, g, c
cacttaacaggtagtgagaaggcctggctttgcccnttctaaactctcctttctagaggttgaaatatacccatattattttgaaaaccttgtcactctggtcatctcatggtctccatgacacttagcctcccagagctgtctgtgagtcacacacctcccacagacactgtatcttagccacaaaaagccatggcctgaggactcgctgcttt

SEQ ID NO: 14 - DNA, 215 bp, Mus musculus; identical to SEQ ID NO: 13
  misc_feature (36)..(36): n = a, t, g, c

SEQ ID NO: 15 - DNA, 603 bp, Mus musculus
  misc_feature (346)..(346): n = a, t, g, c
  misc_feature (349)..(349): n = a, t, g, c
  misc_feature (351)..(351): n = a, t, g, c
  misc_feature (354)..(355): n = a, t, g, c
  misc_feature (358)..(360): n = a, t, g, c
  misc_feature (362)..(362): n = a, t, g, c
  misc_feature (365)..(372): n = a, t, g, c
  misc_feature (374)..(377): n = a, t, g, c
  misc_feature (379)..(381): n = a, t, g, c
caaacaggccaaagatgtctctcgcatgcgctcagtcctcatctccctgaagcaggcccccctggtgcactgaagagccaccctgtggaaacactacgtctacaatatcttaatcctactcagtgaagctgttcacgtaattggattaattatgttgagttcttttggaccaaaccttttgtctttagagttgatcattgtttgtgattgcatgtttccttcaactgtgttctccctggcattcagagacgagagaggaagaggaagggagaggagctcccgacagtagcctcaacctgtgcttttgtgcattattctgagaataaatttctgtttcaaacaatgntananaannaannnanaannnnnnnnannnnannnattagtggggtaattacgtgcatgcagcgtgttagcggggtgtgaacatgggtccagatagagtgtgaaacccttcgcgggtgtatagaagggccgtgccctctcaggagcccgggaagagggccgcgaactgcatgaaggtggcgttgtcgtgcgcgagggagagatgtggtgcgcagcgagatagtgtactgctctcatgctagacgagtgtcatacaaa

SEQ ID NO: 16 - DNA, 603 bp, Mus musculus; identical to SEQ ID NO: 15
  misc_feature (346)..(346): n = a, t, g, c
  misc_feature (349)..(349): n = a, t, g, c
  misc_feature (351)..(351): n = a, t, g, c
  misc_feature (354)..(355): n = a, t, g, c
  misc_feature (358)..(360): n = a, t, g, c
  misc_feature (362)..(362): n = a, t, g, c
  misc_feature (365)..(372): n = a, t, g, c
  misc_feature (374)..(377): n = a, t, g, c
  misc_feature (379)..(381): n = a, t, g, c

SEQ ID NO: 17 - DNA, 476 bp, Mus musculus
cagaggcctggacatggccttgagtggattggagagattttacctggaagaggaagttctaaatacaatgagaagttcaagggcaaggccacattcacttcagattcatcctccaacacagcctacatgcaactcagcagcctgacatctgaggattctgccgtctattactgtgcaagtctccggcccccgtttgcttattggggccaagggactctggtcactgtctctgcaggaggaggtggtagtggtggtggaggatccggaggaggtggttctgacatcgtgatgacccagtctccatcttccatatatgcatctctaggagagagagtcactatcacttgcaaggcgagtcaggatattaaaagctatttaggctggttccagcagaaaccagggaaatctcctaagaccctgatctatcgtgcaaacagattggtagatggggtcccatcaaggttcagtggcagtgg

SEQ ID NO: 18 - DNA, 476 bp, Mus musculus; identical to SEQ ID NO: 17

SEQ ID NO: 19 - DNA, 204 bp, Mus musculus
tattactgtgcaagtctccggcccccgtttgcttattggggccaagggactctggtcactgtctctgcaggaggaggtggtagtggtggtggaggatccggaggaggtggttctgacatcgtgatgacccagtctccatcttccatatatgcatctctaggagagagagtcactatcacttgcaaggcgagtcaggatattaaa

SEQ ID NO: 20 - DNA, 204 bp, Mus musculus; identical to SEQ ID NO: 19

SEQ ID NO: 21 - DNA, 607 bp, Mus musculus
  misc_feature (86)..(90): n = a, t, g, c
  misc_feature (149)..(151): n = a, t, g, c
  misc_feature (153)..(154): n = a, t, g, c
  misc_feature (171)..(172): n = a, t, g, c
  misc_feature (180)..(180): n = a, t, g, c
  misc_feature (184)..(199): n = a, t, g, c
  misc_feature (242)..(260): n = a, t, g, c
  misc_feature (468)..(480): n = a, t, g, c
  misc_feature (485)..(486): n = a, t, g, c
  misc_feature (490)..(490): n = a, t, g, c
  misc_feature (494)..(495): n = a, t, g, c
  misc_feature (498)..(498): n = a, t, g, c
  misc_feature (504)..(505): n = a, t, g, c
  misc_feature (507)..(507): n = a, t, g, c
  misc_feature (515)..(515): n = a, t, g, c
  misc_feature (521)..(521): n = a, t, g, c
  misc_feature (523)..(524): n = a, t, g, c
  misc_feature (527)..(545): n = a, t, g, c
gggccattgctgtgtgggataaacagtaatggcggaggctgcggctcccggaacaacagccacaacatcaggagcaggagcggcannnnnggcggtggcagcggcctccctcacctctatccccacagtcgctgccccgtccccggggnnngnnggagggggcggcggcanngacggcancggnnnnnnnnnnnnnnnncaggtcacctgcagatactttatgcatggggtttgtaaggaannnnnnnnnnnnnnnnnnnctctcatgacctctctgacagtccatacggcgtagtgtgcaagtattttcaaagagggtactgtgtttatggagaccgctgcagatacgaacacagcaagccactgaaacaggaagaagtgactgctactgatctgagtgcaaaaccatccctcgctgcttcctcaagtctctcttctggtgttggatcacttgctgaaatgaattcnnnnnnnnnnnnnctganntcangaannccnagcttnncnactgtagnagcagntnnagnnnnnnnnnnnnnnnnnnnattgattgtcctggcagccaatgtggcgtataatatgtagaccaatcctaggcgtcatacta

SEQ ID NO: 22 - DNA, 607 bp, Mus musculus; identical to SEQ ID NO: 21
  misc_feature (86)..(90): n = a, t, g, c
  misc_feature (149)..(151): n = a, t, g, c
  misc_feature (153)..(154): n = a, t, g, c
  misc_feature (171)..(172): n = a, t, g, c
  misc_feature (180)..(180): n = a, t, g, c
  misc_feature (184)..(199): n = a, t, g, c
  misc_feature (242)..(260): n = a, t, g, c
  misc_feature (468)..(480): n = a, t, g, c
  misc_feature (485)..(486): n = a, t, g, c
  misc_feature (490)..(490): n = a, t, g, c
  misc_feature (494)..(495): n = a, t, g, c
  misc_feature (498)..(498): n = a, t, g, c
  misc_feature (504)..(505): n = a, t, g, c
  misc_feature (507)..(507): n = a, t, g, c
  misc_feature (515)..(515): n = a, t, g, c
  misc_feature (521)..(521): n = a, t, g, c
  misc_feature (523)..(524): n = a, t, g, c
  misc_feature (527)..(545): n = a, t, g, c

SEQ ID NO: 23 - DNA, 193 bp, Mus musculus
ctgacagtccatacggcgtagtgtgcaagtattttcaaagagggtactgtgtttatggagaccgctgcagatacgaacacagcaagccactgaaacaggaagaagtgactgctactgatctgagtgcaaaaccatccctcgctgcttcctcaagtctctcttctggtgttggatcacttgctgaaatgaattc

SEQ ID NO: 24 - DNA, 193 bp, Mus musculus; identical to SEQ ID NO: 23

SEQ ID NO: 25 - DNA, 538 bp, Mus musculus
  misc_feature (155)..(169): n = a, t, g, c
  misc_feature (424)..(452): n = a, t, g, c
cccaatgcagatgatcaagaatgcaaacaaagtcttagtgatactgaccagagtttcaacaaagtagctgagcgtgtcttgatgagactgcaagagaaactgaaaggcgtggaggaaggcactgtgctcagtgtgggtggacaggtgaacttgcnnnnnnnnnnnnnnntggatcccaaaaatctcagccgactcttcccaggatggaaagcttgggtgtgaccttcacccttaaactcgaacttcagaaatgacatctcacccaccatatttggacaggaattacttaagtgaataactgcttttgatccaattttctacttgactgatcaccacctaaatattagtatttctactctcttctgttagaggtaatggtcactcaagatccattcgtaggatacgtgctgactcttaggtcatnnnnnnnnnnnnnnnnnnnnnnnnnnnnntacacactgaactgcaaatggtgggggcagcagagtgagctttactgctggtgtacatgaagacaagttcgtaacttctgctctaa

SEQ ID NO: 26 - DNA, 538 bp, Mus musculus; identical to SEQ ID NO: 25
  misc_feature (155)..(169): n = a, t, g, c
  misc_feature (424)..(452): n = a, t, g, c

SEQ ID NO: 27 - DNA, 413 bp, Mus musculus
  misc_feature (254)..(269): n = a, t, g, c
agagcccgtcagctcagcttatggaacaagtggctcagctcaagtccctgagtgacaccattgagaagctcaaggatgaggtcctcaaggagacagtgactcagcgccctggagccactgtgcccaccgactttgccactttcccttcatctgccttcctcagggccaaggaagagcagcaagatgacacagtctacatgggcaaagtgaccttttcatgcgcggcaggcctaggacagcgacaccgcctggtnnnnnnnnnnnnnnnnctgcaccagcttcacagtcgcctcatctcctaagcactccttccctgccttccctgtggtcccactgcgcagggcacagccacctcagccactcccaggctggaccacacgctaacctcctgagtggttcagctgcgtctggtc

SEQ ID NO: 28 - DNA, 413 bp, Mus musculus; identical to SEQ ID NO: 27
  misc_feature (254)..(269): n = a, t, g, c

SEQ ID NO: 29 - DNA, 554 bp, Mus musculus
  misc_feature (85)..(202): n = a, t, g, c
  misc_feature (269)..(269): n = a, t, g, c
  misc_feature (302)..(384): n = a, t, g, c
  misc_feature (387)..(387): n = a, t, g, c
  misc_feature (394)..(394): n = a, t, g, c
  misc_feature (396)..(396): n = a, t, g, c
  misc_feature (398)..(398): n = a, t, g, c
  misc_feature (407)..(407): n = a, t, g, c
  misc_feature (409)..(409): n = a, t, g, c
  misc_feature (411)..(411): n = a, t, g, c
  misc_feature (450)..(450): n = a, t, g, c
  misc_feature (477)..(477): n = a, t, g, c
  misc_feature (481)..(481): n = a, t, g, c
  misc_feature (483)..(483): n = a, t, g, c
  misc_feature (492)..(492): n = a, t, g, c
agatcttggcttgtaggcgagtgctttacccttaagccccagccccagctcaagcagtgaatgaaccgctgtgctttcagctttnnnnnnnnnnnnnnnnnnnnnnnnnnnnnnnnnnnnnnnnnnnnnnnnnnnnnnnnnnnnnnnnnnnnnnnnnnnnnnnnnnnnnnnnnnnnnnnnnnnnnnnnnnnnnnnnnnnnnntttccaggccacctaaaactatatagtaagagcttgcctcaaataaaaaaaaaaaaaaaaaaaaaangggaaagaaaaaaaaagaaaaaaccaggtgggnnnnnnnnnnnnnnnnnnnnnnnnnnnnnnnnnnnnnnnnnnnnnnnnnnnnnnnnnnnnnnnnnnnnnnnnnnnnnnnncnnccnaggacanananagaaacccncntntaaataaataaatggaaaagaaaaacctcagaacaaaancaaaacaaaaaagaaaggaaacacacnaaantntgtctgttnttatagaagtactggcggccacaacttggatgtcccacatctctgaatattgcctgggctct

SEQ ID NO: 30 - DNA, 554 bp, Mus musculus; identical to SEQ ID NO: 29
  misc_feature (85)..(202): n = a, t, g, c
  misc_feature (269)..(269): n = a, t, g, c
  misc_feature (302)..(384): n = a, t, g, c
  misc_feature (387)..(387): n = a, t, g, c
  misc_feature (394)..(394): n = a, t, g, c
  misc_feature (396)..(396): n = a, t, g, c
  misc_feature (398)..(398): n = a, t, g, c
  misc_feature (407)..(407): n = a, t, g, c
  misc_feature (409)..(409): n = a, t, g, c
  misc_feature (411)..(411): n = a, t, g, c
  misc_feature (450)..(450): n = a, t, g, c
  misc_feature (477)..(477): n = a, t, g, c
  misc_feature (481)..(481): n = a, t, g, c
  misc_feature (483)..(483): n = a, t, g, c
  misc_feature (492)..(492): n = a, t, g, c

SEQ ID NO: 31 - DNA, 500 bp, Mus musculus
  misc_feature (199)..(233): n = a, t, g, c
tgtgcttctaaaagcaggctcgctagaggtggtgtttattaggatgtgccgtgcctttgactctcagaacaacaccgtgtactttgacgggaagtatgcgagccccgatgtcttcaagtccctaggttgtgaagacttcatcagctttgtgtttgaatttgggaagagtttgtgttctatgcacctgaccgaagacgannnnnnnnnnnnnnnnnnnnnnnnnnnnnnnnnnncggatcgctcgtggcttcaggaaaaggtaaaaatagaaaagctgcaacagaaaattcagctggcccttcagcacgtcctacagaagaaccaccgagaagatggaattctaaccaagctaatatgcaaggtgtctacgttaagagccctatgtggacgacatacggaaaagctaatggcatttaaagcaatatacccagacattgtgcgactccattttcctccattatacaaggaattgttcacttcagaatttgagccagccatgc

SEQ ID NO: 32 - DNA, 500 bp, Mus musculus; identical to SEQ ID NO: 31
  misc_feature (199)..(233): n = a, t, g, c

SEQ ID NO: 33 - DNA, 284 bp, Mus musculus
  misc_feature (27)..(27): n = a, t, g, c
  misc_feature (67)..(67): n = a, t, g, c
  misc_feature (75)..(75): n = a, t, g, c
  misc_feature (86)..(86): n = a, t, g, c
  misc_feature (96)..(96): n = a, t, g, c
  misc_feature (98)..(98): n = a, t, g, c
tccttctgttggtgtccctcatcaccntcagcctagaggtacaggagctgcaggctgcagtgagacntctgcagnttttaggcacntgtgctgagntntgccgtggtgactgggactgtgggccagaggaacaatgtgtcagtattggatgcagtcacatctgtactacaaactaaaaacagcttctacctggaaaaaaaaatgtgtctgtttggagctctgtgaccaagaaaacagttgaaaatggaggccatgtatggagattacaagcagcacagtggagt

SEQ ID NO: 34 - DNA, 284 bp, Mus musculus; identical to SEQ ID NO: 33
  misc_feature (27)..(27): n = a, t, g, c
  misc_feature (67)..(67): n = a, t, g, c
  misc_feature (75)..(75): n = a, t, g, c
  misc_feature (86)..(86): n = a, t, g, c
  misc_feature (96)..(96): n = a, t, g, c
  misc_feature (98)..(98): n = a, t, g, c

SEQ ID NO: 35 - DNA, 366 bp, Mus musculus
  misc_feature (141)..(174): n = a, t, g, c
  misc_feature (230)..(244): n = a, t, g, c
  misc_feature (292)..(292): n = a, t, g, c
gcagggacccgaacagtctgcatggctaagtggcacaaggagcctggccctgtccagcttcagagatccaagctgctttttgctggggttctgtcacaggcctgatcctcttggtttttatggggtttcaagtctgccagnnnnnnnnnnnnnnnnnnnnnnnnnnnnnnnnnnatctggccttaacttaagccagccacgtcaggcccctgctgagcctatggaccaannnnnnnnnnnnnnnccactggaggtgggcagctatcaccataccctgagttgggccaagccnaccccacccctaccctgcaacatttctgatgtactgaggaagagtctccaccatagtccccaagggctgagttc

SEQ ID NO: 36 - DNA, 366 bp, Mus musculus; identical to SEQ ID NO: 35
  misc_feature (141)..(174): n = a, t, g, c
  misc_feature (230)..(244): n = a, t, g, c
  misc_feature (292)..(292): n = a, t, g, c

SEQ ID NO: 37 - DNA, 209 bp, Mus musculus
  misc_feature (88)..(88): n = a, t, g, c
aggatttagcccacaggagccctagatgcaaaagacatgttaaccaagtgtttctgagaggttgtcttccacacccactctcgaagcntcagggatttgcttcttaaacttctgcggaggggtttggcttgggaggccatgtagagcaagtacagacagcctgttagtgggagcttgcccccaggccctcaaagggtgtaaggccagct

SEQ ID NO: 38 - DNA, 209 bp, Mus musculus; identical to SEQ ID NO: 37
  misc_feature (88)..(88): n = a, t, g, c

SEQ ID NO: 39 - DNA, 574 bp, Mus musculus
  misc_feature (35)..(35): n = a, t, g, c
  misc_feature (57)..(57): n = a, t, g, c
  misc_feature (81)..(81): n = a, t, g, c
  misc_feature (89)..(89): n = a, t, g, c
  misc_feature (91)..(91): n = a, t, g, c
  misc_feature (98)..(98): n = a, t, g, c
  misc_feature (100)..(100): n = a, t, g, c
  misc_feature (104)..(104): n = a, t, g, c
  misc_feature (167)..(167): n = a, t, g, c
  misc_feature (205)..(205): n = a, t, g, c
ctctgtcctgcagcatcctgaggggggctacgcantcgccagcagcagtgatgaccncatgaatgagcctcccacctcgcngggacttntncctcacnanatcnggggttttctgtcacggttcgataatgttcttcctgtcagcctggcatttgataaatgtacancctgttcacccaaagttcttgatcagtacgagcgaganggattcaccttcctagcgaaggtttttaactcctcacattccttcttagaagacttgaccggtcttaccctgctccatcaagagacccaagctgctgagatctgggacatgagtgacgaggagactgtctgaagcaagcaaccacagctcaggagtacctggccctcagcgcaggactggaccgcaggactggtgatctgggccctgccacctccctggtcctgatctccacatctccaaggacgagggtgtaccctctgccacccagttgcaccctttcctgtgccatctcaccagctctgaactcaataataaccttggcattgccactgatctggggctcaggtccttccatgtgcactaatctcc

SEQ ID NO: 40 - DNA, 574 bp, Mus musculus; identical to SEQ ID NO: 39
  misc_feature (35)..(35): n = a, t, g, c
  misc_feature (57)..(57): n = a, t, g, c
  misc_feature (81)..(81): n = a, t, g, c
  misc_feature (89)..(89): n = a, t, g, c
  misc_feature (91)..(91): n = a, t, g, c
  misc_feature (98)..(98): n = a, t, g, c
  misc_feature (100)..(100): n = a, t, g, c
  misc_feature (104)..(104): n = a, t, g, c
  misc_feature (167)..(167): n = a, t, g, c
  misc_feature (205)..(205): n = a, t, g, c

SEQ ID NO: 41 - DNA, 440 bp, Mus musculus
  misc_feature (240)..(283): n = a, t, g, c
  misc_feature (357)..(371): n = a, t, g, c
aggagcacaagaacccaggcaccctactccttgggctcctgccctcctggagatggaggcctgtgacaggcacttcaactctccatggcccagttatatactcactgtccccagtggggcggggctttcacagcagacacaagctgagtgacccctgcaccctcgtcaaacttgcactcagatagcaggggtggatgtgtctctctgcaggagaggttctgtggtggtggtggtgtcagnnnnnnnnnnnnnnnnnnnnnnnnnnnnnnnnnnnnnnnnnnnnaccctcccttgcagcctttgcctgggtagggttagcatgccagcagcttctgcaggccccgactccaggcctannnnnnnnnnnnnnntctctttccatgttccttagaacagatttaggcatctcaggtcctttctaatgttgtctaggaaagccc

SEQ ID NO: 42 - DNA, 440 bp, Mus musculus; identical to SEQ ID NO: 41
  misc_feature (240)..(283): n = a, t, g, c
  misc_feature (357)..(371): n = a, t, g, c

SEQ ID NO: 43 - DNA, 504 bp, Mus musculus
  misc_feature (182)..(186): n = a, t, g, c
  misc_feature (191)..(193): n = a, t, g, c
  misc_feature (229)..(229): n = a, t, g, c
  misc_feature (397)..(397): n = a, t, g, c
  misc_feature (441)..(441): n = a, t, g, c
  misc_feature (444)..(444): n = a, t, g, c
tggagcggtccctgggaagttacacggaggggagggggcaggggcctttattaaagcaggagtcggcaagaaaagcaggtggcctgaagaatccccgtggacagacagacagtgcagtcacccataaagtagaaagcactactaacagcactggagggtgtagtgtttcctactttatggannnnngcacnnngggcttcggagaccacgccacgccgcggccccctgncaccgtcctccactccaacatcaaggaaacaggtgagcatctctcacacgccctcatttggccaggctccccgaaagaccttcatggctcccccaaagcacggtgcttcctgacccctgatacttggggagacaccacagccgctctctcgaatgcacgtccgtgagnatatggggtggggccggatgtgtggggccttggtcctgcatcgnagnccgactgggggttccagaagggagccggatggatgggtaagggtcacagggccctcaaca

SEQ ID NO: 44 - DNA, 504 bp, Mus musculus; identical to SEQ ID NO: 43
  misc_feature (182)..(186): n = a, t, g, c
  misc_feature (191)..(193): n = a, t, g, c
  misc_feature (229)..(229): n = a, t, g, c
  misc_feature (397)..(397): n = a, t, g, c
  misc_feature (441)..(441): n = a, t, g, c
  misc_feature (444)..(444): n = a, t, g, c

SEQ ID NO: 45 - DNA, 389 bp, Mus musculus
  misc_feature (86)..(141): n = a, t, g, c
atcaagcctgccacgagaagaaggggacttggtgatgagagggagtcagaggtcctgtggtgccatcagaggaggtgaagctgtgnnnnnnnnnnnnnnnnnnnnnnnnnnnnnnnnnnnnnnnnnnnnnnnnnnnnnnnnttatcagagtaaggaactgtgctaggtatgggagagccagagattaaagtcataggccctaacccccaaaagctatcagttggacttcaacatagctagagcctgtgttctgtgcttccaagggagttctgaagaaggccacacaaacattgggacttctttttgacacttacggagtttttcaagtgtaaacaaataggaactggaggattatttctaaagttcatgagtaaatccagcttttattg

SEQ ID NO: 46 - DNA, 389 bp, Mus musculus; identical to SEQ ID NO: 45
  misc_feature (86)..(141): n = a, t, g, c

SEQ ID NO: 47 - DNA, 338 bp, Mus musculus
  misc_feature (30)..(82): n = a, t, g, c
  misc_feature (240)..(254): n = a, t, g, c
cttctcggtgtggatcatatgtgaaggtcnnnnnnnnnnnnnnnnnnnnnnnnnnnnnnnnnnnnnnnnnnnnnnnnnnnnncctgaagaacttgcaggatatcaacactctagaagtggcgggtgatatccagctgacccacgtgcagacataggcaaggtctctggcctagggataagggctggagcactctgcctgtgtcttatctttcccctgtctcagccctggcaccatcagannnnnnnnnnnnnnntaggaattccaggaaggtgaaattcccaattgactccctccacaaagggggttttctaggctgtgtggcacatggctgtcagcc

SEQ ID NO: 48 - DNA, 338 bp, Mus musculus; identical to SEQ ID NO: 47
  misc_feature (30)..(82): n = a, t, g, c
  misc_feature (240)..(254): n = a, t, g, c

SEQ ID NO: 49 - DNA, 392 bp, Mus musculus
  misc_feature (81)..(103): n = a, t, g, c
  misc_feature (131)..(131): n = a, t, g, c
  misc_feature (191)..(191): n = a, t, g, c
  misc_feature (197)..(197): n = a, t, g, c
  misc_feature (206)..(206): n = a, t, g, c
  misc_feature (249)..(249): n = a, t, g, c
  misc_feature (252)..(275): n = a, t, g, c
  misc_feature (289)..(289): n = a, t, g, c
  misc_feature (292)..(292): n = a, t, g, c
  misc_feature (296)..(296): n = a, t, g, c
  misc_feature (302)..(302): n = a, t, g, c
  misc_feature (305)..(319): n = a, t, g, c
tgattccttaacaggccatctgacctttggaactctaggcataaaatacatggtaactggagagtttttgatacgggtctnnnnnnnnnnnnnnnnnnnnnnngtggtggctcgtgcttgtcccagtcctngggaggagagagagacaggcagattcctaggaccaggctgcccagcgaatctcacctatntccatnttcccaggntaggattacctatatgcatggtaggttctagaattgaattcangcnnnnnnnnnnnnnnnnnnnnnnnntcactaactgagcngtntccntaaccnatnnnnnnnnnnnnnnnctaaaggtattttcaccttttgaatgttaatcatattttgacaacttttggttttaaacttccatgttttcag

SEQ ID NO: 50 - DNA, 392 bp, Mus musculus; identical to SEQ ID NO: 49
  misc_feature (81)..(103): n = a, t, g, c
  misc_feature (131)..(131): n = a, t, g, c
  misc_feature (191)..(191): n = a, t, g, c
  misc_feature (197)..(197): n = a, t, g, c
  misc_feature (206)..(206): n = a, t, g, c
  misc_feature (249)..(249): n = a, t, g, c
  misc_feature (252)..(275): n = a, t, g, c
  misc_feature (289)..(289): n = a, t, g, c
  misc_feature (292)..(292): n = a, t, g, c
  misc_feature (296)..(296): n = a, t, g, c
  misc_feature (302)..(302): n = a, t, g, c
  misc_feature (305)..(319): n = a, t, g, c

SEQ ID NO: 51 - DNA, 140 bp, Mus musculus
actcaagaactttgcctctgtgtctccttcaggtgttaacgtgggcacgagagacaagagagctaacatggcatgggtctctccccacttccgtgctcagtccttatgtggaacatgaagcccaggctgcttgtctgtaa

SEQ ID NO: 52 - DNA, 140 bp, Mus musculus; identical to SEQ ID NO: 51

SEQ ID NO: 53 - DNA, 553 bp, Mus musculus
  misc_feature (28)..(28): n = a, t, g, c
  misc_feature (30)..(30): n = a, t, g, c
  misc_feature (37)..(67): n = a, t, g, c
  misc_feature (89)..(89): n = a, t, g, c
  misc_feature (186)..(209): n = a, t, g, c
  misc_feature (214)..(238): n = a, t, g, c
  misc_feature (245)..(245): n = a, t, g, c
  misc_feature (313)..(328): n = a, t, g, c
  misc_feature (446)..(446): n = a, t, g, c
  misc_feature (467)..(467): n = a, t, g, c
gatcaacaaagactggctggagggcacntnccagggnnnnnnnnnnnnnnnnnnnnnnnnnnnnnnngaagatccttaaggactttccngaggacgaggacaccaccaactggctacgatgctacttctatgaagacacaggcaaaaccatcaaggacattgcggtggaggaggacctcagcagcnnnnnnnnnnnnnnnnnnnnnnnngcgcnnnnnnnnnnnnnnnnnnnnnnnnnagacatngcccttagctaccaggatgctgagggggacttggttaggctgctgtcagatgaggatgtgggactcannnnnnnnnnnnnnnnaggcctcccttcccagaagcgcctcttcccctggaagctgcatgtcacacagaaggacaactacagtgtctacaacactgtcccctgagtcacagggaccctgtggcaaggacggggngctcagcaaagggcctttacnttccaagaacacggagaccttcagggagactgatgtaagatgcaaacctcctggcccagagtgcctactggacaggattctattaa

SEQ ID NO: 54 - DNA, 553 bp, Mus musculus; identical to SEQ ID NO: 53
  misc_feature (28)..(28): n = a, t, g, c
  misc_feature (30)..(30): n = a, t, g, c
  misc_feature (37)..(67): n = a, t, g, c
  misc_feature (89)..(89): n = a, t, g, c
  misc_feature (186)..(209): n = a, t, g, c
  misc_feature (214)..(238): n = a, t, g, c
  misc_feature (245)..(245): n = a, t, g, c
  misc_feature (313)..(328): n = a, t, g, c
  misc_feature (446)..(446): n = a, t, g, c
  misc_feature (467)..(467): n = a, t, g, c

SEQ ID NO: 55 - DNA, 491 bp, Mus musculus
  misc_feature (150)..(152): n = a, t, g, c
  misc_feature (178)..(192): n = a, t, g, c
  misc_feature (257)..(274): n = a, t, g, c
  misc_feature (320)..(320): n = a, t, g, c
  misc_feature (324)..(324): n = a, t, g, c
  misc_feature (442)..(442): n = a, t, g, c
  misc_feature (444)..(444): n = a, t, g, c
  misc_feature (450)..(450): n = a, t, g, c
gtagcctccacaaacacatcaatggcctctttcactaagtccagtttccgaagcaccaccccatacaggtaaaggccgaatccatcaagtccccgagcctggtgcttccggctgagttccactctcagttctctgagagcctcgtttttnnnttgtcccttctctaggggtcctaggnnnnnnnnnnnnnnntcatccttcttcttctctccagacaggtatctggaatacatgtacaggaaataggctttcttgcnnnnnnnnnnnnnnnnnnaatgtgccgcccggtcatactctttaacatcaaagtaggccttggncagnggtgtaagcatccacatcctgcgcgtcctcctctgtcagaggcggcggcggctgcagctccgacaaaggcaaggcgggcagagagaaggccaactccgcagaccatttgctgctatgnancaggcncccgctcccgagtgaggcccgcgatgagcagcagctgcttt

SEQ ID NO: 56 - DNA, 491 bp, Mus musculus; identical to SEQ ID NO: 55
  misc_feature (150)..(152): n = a, t, g, c
  misc_feature (178)..(192): n = a, t, g, c
  misc_feature (257)..(274): n = a, t, g, c
  misc_feature (320)..(320): n = a, t, g, c
  misc_feature (324)..(324): n = a, t, g, c
  misc_feature (442)..(442): n = a, t, g, c
  misc_feature (444)..(444): n = a, t, g, c
  misc_feature (450)..(450): n = a, t, g, c

SEQ ID NO: 57 - DNA, 435 bp, Mus musculus
  misc_feature (27)..(43): n = a, t, g, c
  misc_feature (61)..(61): n = a, t, g, c
  misc_feature (65)..(65): n = a, t, g, c
  misc_feature (68)..(69): n = a, t, g, c
  misc_feature (71)..(73): n = a, t, g, c
  misc_feature (75)..(75): n = a, t, g, c
  misc_feature (99)..(99): n = a, t, g, c
  misc_feature (106)..(106): n = a, t, g, c
  misc_feature (200)..(201): n = a, t, g, c
  misc_feature (210)..(210): n = a, t, g, c
  misc_feature (216)..(216): n = a, t, g, c
  misc_feature (271)..(286): n = a, t, g, c
  misc_feature (311)..(331): n = a, t, g, c
caccaggaatctgttagtttctgacannnnnnnnnnnnnnnnnaaaaagaaatattcccanttcnganngnnnangcaatatttaaacccagataaagntgcatgnttattgaaaaaacaaagatttgtttcaaaacgtgacacttggatttgaagacatttgttaatttatggtctgcacagaaataaatttgcttccnnaccaaattnagactngaagctagagagtggtaagccactcagttcgtgactggttggactgtgagcttgnnnnnnnnnnnnnnnnaacaccagtgtctgttagcacagtnnnnnnnnnnnnnnnnnnnnnggctgtcccctcaggtgagctctccctggactggacacatgatgagtgagtcaccctaagcttggagtggccatctgtttcacaagtcagctccattgtggtgg

SEQ ID NO: 58 - DNA, 435 bp, Mus musculus; identical to SEQ ID NO: 57
  misc_feature (27)..(43): n = a, t, g, c
  misc_feature (61)..(61): n = a, t, g, c
  misc_feature (65)..(65): n = a, t, g, c
  misc_feature (68)..(69): n = a, t, g, c
  misc_feature (71)..(73): n = a, t, g, c
  misc_feature (75)..(75): n = a, t, g, c
  misc_feature (99)..(99): n = a, t, g, c
  misc_feature (106)..(106): n = a, t, g, c
  misc_feature (200)..(201): n = a, t, g, c
  misc_feature (210)..(210): n = a, t, g, c
  misc_feature (216)..(216): n = a, t, g, c
  misc_feature (271)..(286): n = a, t, g, c
  misc_feature (311)..(331): n = a, t, g, c

SEQ ID NO: 59 - DNA, 269 bp, Mus musculus
  misc_feature (154)..(154): n = a, t, g, c
ttttcctgaaggtgctatttaacaagggagaagagagtgcggggacttcaccctgcccactctctactctctctccactcttctagttcctgggcctatctgatctctctctttcttctgaaaccctcccctcttgctgctgctccctcccctntgcctctctcttggtctgtcctgcatcagggtttcagagcaccactttccaaagcacaaaacagtttttacccctgggctgggaggaaacaagagactctgtacctattttgtat

SEQ ID NO: 60 - DNA, 269 bp, Mus musculus; identical to SEQ ID NO: 59
  misc_feature (154)..(154): n = a, t, g, c

SEQ ID NO: 61 - DNA, 398 bp, Mus musculus
ccttttagtcaaaagcaagaaaatgacaagaaagagattaaattcaatgttttcctttaatagtgttaaacactaaaattttaaaataagaaagaaaaaactttgtaaaatgtaagaacagaagcaaaagacactacgctgtcatttttatctttcttttgttgaaagattaaaaactgaaatgttttttagacaatcaaatgttaggtaagtgcaaaaaacttgtttttcttactggtgtagaaattaatgccttttttatttttcagttattttataataacaaaataaaaacaacccccagctgccaggtgggttttggtgttcgaaatgcggggcaaagcactacatcactgcaaatagatacagagttagtctgcatgtctgtaggctgtgtg

SEQ ID NO: 62 - DNA, 398 bp, Mus musculus; identical to SEQ ID NO: 61

SEQ ID NO: 63 - DNA, 282 bp, Mus musculus
  misc_feature (34)..(34): n = a, t, g, c
  misc_feature (60)..(60): n = a, t, g, c
  misc_feature (79)..(122): n = a, t, g, c
  misc_feature (133)..(151): n = a, t, g, c
  misc_feature (153)..(154): n = a, t, g, c
  misc_feature (162)..(162): n = a, t, g, c
  misc_feature (166)..(166): n = a, t, g, c
  misc_feature (168)..(168): n = a, t, g, c
  misc_feature (179)..(180): n = a, t, g, c
tccaagtcttggaagagagcctagtgcctgccancacagccttgggtcatcagcgagagnttcagaaatccgccaccannnnnnnnnnnnnnnnnnnnnnnnnnnnnnnnnnnnnnnnnnnnagtgctgtgcnnnnnnnnnnnnnnnnnnncnnggagccgngtgnancagagcttcanngcaaggtagtgcagagagggcatgacttctttgacagcaatggaaacttcctctacagaatttgagcctacgactggcttttggagatgtcttgacacagct

SEQ ID NO: 64 - DNA, 282 bp, Mus musculus; identical to SEQ ID NO: 63
  misc_feature (34)..(34): n = a, t, g, c
  misc_feature (60)..(60): n = a, t, g, c
  misc_feature (79)..(122): n = a, t, g, c
  misc_feature (133)..(151): n = a, t, g, c
  misc_feature (153)..(154): n = a, t, g, c
  misc_feature (162)..(162): n = a, t, g, c
  misc_feature (166)..(166): n = a, t, g, c
  misc_feature (168)..(168): n = a, t, g, c
  misc_feature (179)..(180): n = a, t, g, c

SEQ ID NO: 65 - DNA, 285 bp, Mus musculus
  misc_feature (27)..(27): n = a, t, g, c
  misc_feature (62)..(62): n = a, t, g, c
  misc_feature (153)..(153): n = a, t, g, c
  misc_feature (160)..(160): n = a, t, g, c
  misc_feature (246)..(246): n = a, t, g, c
gcatcactctgtctcacgctggctttngtcactgtctgagtctccccagcactgtgccaggnatacatccctttcttcaccatcccttaaaccaggcctcttccccggtgtctctggacatggaatgagcataggcacaaagacccagaccantggaaangtgatgaagtgggagcctaggactgattgtagcctaggctgcttcactacctaaacagttcagctggcatcccaggcatggtgccnaggactggcctccttcctggtgctgatgcagagaaatct

SEQ ID NO: 66 - DNA, 285 bp, Mus musculus; identical to SEQ ID NO: 65
  misc_feature (27)..(27): n = a, t, g, c
  misc_feature (62)..(62): n = a, t, g, c
  misc_feature (153)..(153): n = a, t, g, c
  misc_feature (160)..(160): n = a, t, g, c
  misc_feature (246)..(246): n = a, t, g, c

SEQ ID NO: 67 - DNA, 515 bp, Mus musculus
  misc_feature (71)..(72): n = a, t, g, c
  misc_feature (74)..(83): n = a, t, g, c
  misc_feature (259)..(259): n = a, t, g, c
  misc_feature (308)..(308): n = a, t, g, c
  misc_feature (311)..(311): n = a, t, g, c
  misc_feature (313)..(313): n = a, t, g, c
  misc_feature (316)..(317): n = a, t, g, c
  misc_feature (320)..(320): n = a, t, g, c
  misc_feature (322)..(322): n = a, t, g, c
  misc_feature (324)..(326): n = a, t, g, c
  misc_feature (328)..(328): n = a, t, g, c
  misc_feature (355)..(356): n = a, t, g, c
  misc_feature (366)..(366): n = a, t, g, c
  misc_feature (386)..(401): n = a, t, g, c
  misc_feature (455)..(455): n = a, t, g, c
tcacgccagctgtgtgcctggcgaccttcctgttctccctgatcaaatacacgccactgacctacaacaannannnnnnnnnnccatggtggggggatgccctagggtggctcctagctctgtcctccatgatctgcattcctgcctggagcatctacaagctgaggactctcaagggcccactcagagagagacttcgccagctcgtgtgcccggctgaagaccttccccagaagaaccaaccagagccaactgctcntgcgacaccgatgacatcccttctcaggctcacagaactggagtctaantgntnggnncangncnnntnacacacctgtgagcctggctgtggggnnagctatagangcagaggggcggaactaccnnnnnnnnnnnnnnnngaaagacgaaagggggtatttgggactcaccttctgaactgggtacctcctatnttgatgcccctattccagggtggtccacacattgtgacgtgcccgaatcaataacatccc

SEQ ID NO: 68 - DNA, 515 bp, Mus musculus; identical to SEQ ID NO: 67
  misc_feature (71)..(72): n = a, t, g, c
  misc_feature (74)..(83): n = a, t, g, c
  misc_feature (259)..(259): n = a, t, g, c
  misc_feature (308)..(308): n = a, t, g, c
  misc_feature (311)..(311): n = a, t, g, c
  misc_feature (313)..(313): n = a, t, g, c
  misc_feature (316)..(317): n = a, t, g, c
  misc_feature (320)..(320): n = a, t, g, c
  misc_feature (322)..(322): n = a, t, g, c
  misc_feature (324)..(326): n = a, t, g, c
  misc_feature (328)..(328): n = a, t, g, c
  misc_feature (355)..(356): n = a, t, g, c
  misc_feature (366)..(366): n = a, t, g, c
  misc_feature (386)..(401): n = a, t, g, c
  misc_feature (455)..(455): n = a, t, g, c

SEQ ID NO: 69 - DNA, 472 bp, Mus musculus
  misc_feature (156)..(170): n = a, t, g, c
  misc_feature (397)..(397): n = a, t, g, c
  misc_feature (447)..(447): n = a, t, g, c
ggcaatagctcattggtataatacctgcctcacgctcatgaggcctcaagttcatcccctagaactccagaaaaaggcaaaaaggggatgtcttcgaggttaaaagagttggcccagtggttaagaatactggctactcttgcaaaggaccaggannnnnnnnnnnnnnnccacagagtagctcacagttacctgcaaattctgtctcaggggatctgatctcatcctctcacctccacagggaccaggaacatgtttatatggtacatggacatacatgtaaggcaaacattcatacaataaaaataaattaagaaacattttaaatatgtaattaaattaaaaagggaaagataaatcacagtagcctcaataaggactaagaattttacaaaantcctatttagtcagaatccttgagaaaatactaaagaaggtttctaattntatgccagaactaggggacatgatg

SEQ ID NO: 70 - DNA, 472 bp, Mus musculus; identical to SEQ ID NO: 69
  misc_feature (156)..(170): n = a, t, g, c
  misc_feature (397)..(397): n = a, t, g, c
  misc_feature (447)..(447): n = a, t, g, c

SEQ ID NO: 71 - DNA, 297 bp, Mus musculus
  misc_feature (70)..(112): n = a, t, g, c
  misc_feature (192)..(212): n = a, t, g, c
gatggtcagactagccgctgttgtcctggtaatgcaggcacaaaggcagttattcccagtggagctcacnnnnnnnnnnnnnnnnnnnnnnnnnnnnnnnnnnnnnnnnnnngcatggtgcctttaacccaaaggcctggaacccgacatcacagattctccctcttcgtgcctttcccgacctctttggannnnnnnnnnnnnnnnnnnnncctagttccagatgtcgaaccacatcgaggactggtagggaaggagcttaaagtgagcggctgcatgctggaggtacgctggatc

SEQ ID NO: 72 - DNA, 297 bp, Mus musculus; identical to SEQ ID NO: 71
  misc_feature (70)..(112): n = a, t, g, c
  misc_feature (192)..(212): n = a, t, g, c

SEQ ID NO: 73 - DNA, 217 bp, Mus musculus
  misc_feature (116)..(116): n = a, t, g, c
  misc_feature (119)..(133): n = a, t, g, c
agttccagatgtcgaaccacatcgaggactggtagggaaggagcttaaagtgagcggctgcatgctggaggtacgctggatcgcggaagattctcgcctcctccgactttccatcntcnnnnnnnnnnnnnnnctttccctagtggtgaacaccatacagctctttgggcccccagtttcctgttaagcctggctggggacccatgtctgaccttat

SEQ ID NO: 74 - DNA, 217 bp, Mus musculus; identical to SEQ ID NO: 73
  misc_feature (116)..(116): n = a, t, g, c
  misc_feature (119)..(133): n = a, t, g, c

SEQ ID NO: 75 - DNA, 277 bp, Mus musculus
  misc_feature (161)..(161): n = a, t, g, c
cgcagttggcctggttatatggaaaagctgctttggaatagatgtttacttgggttcctgtgcagaactgggcagcaatcctggaaagctctgtaaagcccataagaaaggatttgaagagggctgcgcttaagtctttgaacatgaagcacatgtgtgcnatgctgtcaaaagactggagtgattgtcataccagggcctgacctccaggagacactttgaaaaggcaacagaggagcaccaagggaagtgaatttgcttggcttgctttgtctgc

SEQ ID NO: 76 - DNA, 277 bp, Mus musculus; identical to SEQ ID NO: 75
  misc_feature (161)..(161): n = a, t, g, c

SEQ ID NO: 77 - DNA, 442 bp, Mus musculus
  misc_feature (167)..(167): n = a, t, g, c
  misc_feature (188)..(272): n = a, t, g, c
  misc_feature (353)..(353): n = a, t, g, c
gcctctgttttgctgggtctgtggagcccacttgagcccagcagttaactcccctggcactcagctctgcctctagttcagccgcccagccactgagagtcagggcatggtgctgcgggggagggctcttttctatatttatttgatagcgataagtctccgaaggnagtggaaatgcagtcagcctnnnnnnnnnnnnnnnnnnnnnnnnnnnnnnnnnnnnnnnnnnnnnnnnnnnnnnnnnnnnnnnnnnnnnnnnnnnnnnnnnnnnngcctgatgcctcaggcctgattccctccttttaaagcaataccttcaggtctgccatgccatcagccagcctggttccttntgagggcaacctgggtctggtggtatttctggtggtgcagatgaggggagggtggggccctcgctgctgtcaggcactgagaagtcctg

SEQ ID NO: 78 - DNA, 442 bp, Mus musculus; identical to SEQ ID NO: 77
  misc_feature (167)..(167): n = a, t, g, c
  misc_feature (188)..(272): n = a, t, g, c
  misc_feature (353)..(353): n = a, t, g, c

SEQ ID NO: 79 - DNA, 443 bp, Mus musculus
  misc_feature (40)..(40): n = a, t, g, c
  misc_feature (46)..(46): n = a, t, g, c
  misc_feature (49)..(49): n = a, t, g, c
  misc_feature (52)..(52): n = a, t, g, c
  misc_feature (74)..(74): n = a, t, g, c
  misc_feature (83)..(83): n = a, t, g, c
  misc_feature (95)..(95): n = a, t, g, c
  misc_feature (102)..(102): n = a, t, g, c
  misc_feature (106)..(106): n = a, t, g, c
  misc_feature (113)..(113): n = a, t, g, c
  misc_feature (167)..(167): n = a, t, g, c
  misc_feature (172)..(172): n = a, t, g, c
  misc_feature (180)..(240): n = a, t, g, c
  misc_feature (254)..(254): n = a, t, g, c
  misc_feature (260)..(260): n = a, t, g, c
  misc_feature (281)..(283): n = a, t, g, c
  misc_feature (305)..(305): n = a, t, g, c
  misc_feature (368)..(368): n = a, t, g, c
  misc_feature (370)..(370): n = a, t, g, c
  misc_feature (393)..(393): n = a, t, g, c
  misc_feature (395)..(395): n = a, t, g, c
  misc_feature (402)..(402): n = a, t, g, c
  misc_feature (404)..(404): n = a, t, g, c
ctccagctctgtggatgagagagtggctcgcaggtttggnaatgcnacnttncttcaatctaaggacttgtttnggggctccntatccaggcgtngtctgtncttncctgagnagcgtgaggtgctgatacccccacacgaagtcttcttggtcactgggttctccnaggantggagccnnnnnnnnnnnnnnnnnnnnnnnnnnnnnnnnnnnnnnnnnnnnnnnnnnnnnnnnnnnnntgggtggggagaangagacntggctgtgtgtcctcaagagnnntcgggcagccagaggcaccctnccacagaggctctggctctgcaatcaggaaagacactgctcttggacccaaggaagctgcagntntccagagctggaccctgaaagcntnttaggantnttgggaactaatgaccttactatgaagaaggggctttga

SEQ ID NO: 80 - DNA, 443 bp, Mus musculus; identical to SEQ ID NO: 79
  misc_feature (40)..(40): n = a, t, g, c
  misc_feature (46)..(46): n = a, t, g, c
  misc_feature (49)..(49): n = a, t, g, c
  misc_feature (52)..(52): n = a, t, g, c
  misc_feature (74)..(74): n = a, t, g, c
  misc_feature (83)..(83): n = a, t, g, c
  misc_feature (95)..(95): n = a, t, g, c
  misc_feature (102)..(102): n = a, t, g, c
  misc_feature (106)..(106): n = a, t, g, c
  misc_feature (113)..(113): n = a, t, g, c
  misc_feature (167)..(167): n = a, t, g, c
  misc_feature (172)..(172): n = a, t, g, c
  misc_feature (180)..(240): n = a, t, g, c
  misc_feature (254)..(254): n = a, t, g, c
  misc_feature (260)..(260): n = a, t, g, c
  misc_feature (281)..(283): n = a, t, g, c
  misc_feature (305)..(305): n = a, t, g, c
  misc_feature (368)..(368): n = a, t, g, c
  misc_feature (370)..(370): n = a, t, g, c
  misc_feature (393)..(393): n = a, t, g, c
  misc_feature (395)..(395): n = a, t, g, c
  misc_feature (402)..(402): n = a, t, g, c
  misc_feature (404)..(404): n = a, t, g, c

SEQ ID NO: 81 - DNA, 471 bp, Mus musculus
  misc_feature (366)..(366): n = a, t, g, c
  misc_feature (391)..(391): n = a, t, g, c
  misc_feature (412)..(412): n = a, t, g, c
  misc_feature (418)..(418): n = a, t, g, c
ccacacacacagtgttaaggagcccagagcagctgcttcccctcccccaactctgtccccacatcatgggtttgctcagtgccacccctcacctcttctgcttacattagctctgtcaccatctggtccatcgtgaagagctgacatttagaggcagattgggcatgagaggtcagcactgggagggcaggctccccagttttagggttccaggacagtttgtactgggcacctggtttgcacacagtacagtttagcgtctagtggcggtaagccactctgctttagatcaatcactagggtccccacttagaagggtcctcgccttagatcaatcacatggacactaaggcacgttttagcgtntcttgtcttaatgattatgtctgtntctccgtccatttgtgttttntgcgtngtgtcatggatgtaacccttggaaatactgcacactagcctttgacaaccatg

SEQ ID NO: 82 - DNA, 471 bp, Mus musculus; identical to SEQ ID NO: 81
  misc_feature (366)..(366): n = a, t, g, c
  misc_feature (391)..(391): n = a, t, g, c
  misc_feature (412)..(412): n = a, t, g, c
  misc_feature (418)..(418): n = a, t, g, c

SEQ ID NO: 83 - DNA, 386 bp, Mus musculus
  misc_feature (147)..(312): n = a, t, g, c
ttccactttaaagtggcatatctggctttgtcacagaggggaaacttgtctgtgccaaccccagtcatctgaaaactcagatgcctggaaggtctgaagctgacctcaatgactacacataatatttgattgagataaatgggcaannnnnnnnnnnnnnnnnnnnnnnnnnnnnnnnnnnnnnnnnnnnnnnnnnnnnnnnnnnnnnnnnnnnnnnnnnnnnnnnnnnnnnnnnnnnnnnnnnnnnnnnnnnnnnnnnnnnnnnnnnnnnnnnnnnnnnnnnnnnnnnnnnnnnnnnnnnnnnnnnnnnnnattcaccttgacatgaccatcttgagctacagccatcctaactgcctcagaatcactcaagttcttccactcgg

SEQ ID NO: 84 - DNA, 385 bp, Mus musculus
  misc_feature (147)..(312): n = a, t, g, c
ttccactttaaagtggcatatctggctttgtcacagaggggaaacttgtctgtgccaaccccagtcatctgaaaactcagatgcctggaaggtctgaagctgacctcaatgactacacataatatttgattgagataaatgggcaannnnnnnnnnnnnnnnnnnnnnnnnnnnnnnnnnnnnnnnnnnnnnnnnnnnnnnnnnnnnnnnnnnnnnnnnnnnnnnnnnnnnnnnnnnnnnnnnnnnnnnnnnnnnnnnnnnnnnnnnnnnnnnnnnnnnnnnnnnnnnnnnnnnnnnnnnnnnnnnnnnnnnattcaccttgacatgaccatcttgagctacagccatcctaactgcctcagaatcactcaagttcttccactcg

SEQ ID NO: 85 - DNA, 392 bp, Mus musculus
  misc_feature (86)..(88): n = a, t, g, c
  misc_feature (116)..(156): n = a, t, g, c
ggaggctccatctaaaccaaaacaaatcatcggagcatacagagtgactcagaggcaaagggtgctgttgtcacaagcactgtgtnnnggctgcaggtctctgctgcacttcgccnnnnnnnnnnnnnnnnnnnnnnnnnnnnnnnnnnnnnnnnnctctctgacagtgagagacgagacacggagcatcccttgttattcagtatacagagattttaacttgactttaatattgtagcatgtcagtcctttggagtccattctcctacctttcctagagtatataacttctgatattttcttagctgtgtgatataaccagttacctgaccacttttaccctgttctttctccatcccccaaatcctgctaagtttcgatggctgttgctt

SEQ ID NO: 86 - DNA, 392 bp, Mus musculus; identical to SEQ ID NO: 85
  misc_feature (86)..(88): n = a, t, g, c
  misc_feature (116)..(156): n = a, t, g, c

SEQ ID NO: 87 - DNA, 516 bp, Mus musculus
ggcatgtcttcacaccataaactagtaagacgccaactgcccaggcggttacgatcatcagtacccaccgtcttagtctctgttacgtgaagtttattccagttgctttttatggaatatcttgaacaagtaatcttcttgacaagaaagaatgtatagaagtctccctgcaattaatttccagtgtttacattttttaactagactgtggggttgctacagattaatatgaaatggcgctcctggtccgtgtgtgtgttaacttgtgctgtagctgaagccgtgtgtccttagatattagttggaagctctcaataataaaaagaaaaagaaaaggtgcccactgctgacagcacagaaaatgggttggggaagcctgctagctgtcctagtagtgagtgtgacatggcgtccctccgtgctgctcctggggagaggccatgctgacagtgtgtcccggtgctgaggacaggcagcccccctccttgtctacttgggcttcagtgttttcatgga

SEQ ID NO: 88 - DNA, 516 bp, Mus musculus; identical to SEQ ID NO: 87

SEQ ID NO: 89 - DNA, 257 bp, Mus musculus
  misc_feature (54)..(68): n = a, t, g, c
caacaaaatcagatacctggacttgtcctataacgacatccgcttcatcccgcnnnnnnnnnnnnnnntgcaaagtttacagtatttttccatcacttgtaacaaagtggagagcctcccagatgaactctacttctgcaagaaacttaaaactttgaagattgggaaaaacagcctctccgtactttcaccaaaaattggaaatctactatttctttcctacttagacatcaaaggcaatcactttgaagtcctcc

SEQ ID NO: 90 - DNA, 257 bp, Mus musculus; identical to SEQ ID NO: 89
  misc_feature (54)..(68): n = a, t, g, c

SEQ ID NO: 91 - DNA, 497 bp, Mus musculus
  misc_feature (129)..(133): n = a, t, g, c
  misc_feature (135)..(138): n = a, t, g, c
  misc_feature (146)..(146): n = a, t, g, c
  misc_feature (169)..(170): n = a, t, g, c
  misc_feature (176)..(177): n = a, t, g, c
  misc_feature (181)..(228): n = a, t, g, c
  misc_feature (443)..(443): n = a, t, g, c
ttacaaccccgaggagaacctcaatgacgtgcttctcctccagctaaaccggacagcctccctgggcaaggaggtggcggtggcttctctgccccagcaggaccagactctgtcccagggcacccagtnnnnngnnnnatgggctnggggtcgcctgggcacccaagcnnccacgnnccgnnnnnnnnnnnnnnnnnnnnnnnnnnnnnnnnnnnnnnnnnnnnnnnncaacgtgtgcacgctggtgccacggagggcagcaggcatatgcttcggagactcgggcggccccttgatctgcaatggcattcttcatggagtggactccttcgtgatccgcgaatgcgcctccctccagttccctgatttcttcgcccgggtgtccatgtatgtggactggattcaaaacgtgctgcggggcgcagagccctgaggtgcccttntgcgctccaggcagcctaaagctggggcgaccagcaggctctagtgggaaaaaa

SEQ ID NO: 92 - DNA, 497 bp, Mus musculus; identical to SEQ ID NO: 91
  misc_feature (129)..(133): n = a, t, g, c
  misc_feature (135)..(138): n = a, t, g, c
  misc_feature (146)..(146): n = a, t, g, c
  misc_feature (169)..(170): n = a, t, g, c
  misc_feature (176)..(177): n = a, t, g, c
  misc_feature (181)..(228): n = a, t, g, c
  misc_feature (443)..(443): n = a, t, g, c

SEQ ID NO: 93 - DNA, 288 bp, Mus musculus
  misc_feature (36)..(37): n = a, t, g, c
  misc_feature (43)..(43): n = a, t, g, c
  misc_feature (49)..(49): n = a, t, g, c
  misc_feature (64)..(64): n = a, t, g, c
  misc_feature (84)..(84): n = a, t, g, c
  misc_feature (108)..(108): n = a, t, g, c
  misc_feature (131)..(131): n = a, t, g, c
  misc_feature (133)..(133): n = a, t, g, c
  misc_feature (160)..(160): n = a, t, g, c
  misc_feature (171)..(171): n = a, t, g, c
  misc_feature (199)..(199): n = a, t, g, c
  misc_feature (223)..(237): n = a, t, g, c
ccgaggcgaggttctttgcacgctgggctgtagccnngccggnctgtgnttatggaactcagcnccgattacctccgcgagaanctgcggcaggacctggaggcagancatgtggaggtggaggacacgantntgaaccgttgcgcgaccagcttccgantcctggtggtntcggctaagttcgagggaaagccactgntccagagacaccggctggtgaacnnnnnnnnnnnnnnngagctcccgcacatccatgcctttgagcagaaaactctgaccccagagcag

SEQ ID NO: 94 - DNA, 288 bp, Mus musculus; identical to SEQ ID NO: 93
  misc_feature (36)..(37): n = a, t, g, c
  misc_feature (43)..(43): n = a, t, g, c
  misc_feature (49)..(49): n = a, t, g, c
  misc_feature (64)..(64): n = a, t, g, c
  misc_feature (84)..(84): n = a, t, g, c
  misc_feature (108)..(108): n = a, t, g, c
  misc_feature (131)..(131): n = a, t, g, c
  misc_feature (133)..(133): n = a, t, g, c
  misc_feature (160)..(160): n = a, t, g, c
  misc_feature (171)..(171): n = a, t, g, c
  misc_feature (199)..(199): n = a, t, g, c
  misc_feature (223)..(237): n = a, t, g, c

SEQ ID NO: 95 - DNA, 290 bp, Mus musculus
  misc_feature (69)..(69): n = a, t, g, c
  misc_feature (180)..(202): n = a, t, g, c
cctacaaacagttctgtgaaagagatcagagagtgaaagaaagatggccggggattcaagcctgctggntgcagtctctcttctctctgcctgtcagcaaagttatttcgcttggcgggtcggacgagcaagactaaaacacaagattgcacccccagcagtcacgggccctctggaatnnnnnnnnnnnnnnnnnnnnnnncaaaactctttggagttttatcctgtattcatcgtaatgctgtggatggctgggtggtacttcaatcaagtttttgcagcctgtctgg

SEQ ID NO: 96 - DNA, 290 bp, Mus musculus; identical to SEQ ID NO: 95
  misc_feature (69)..(69): n = a, t, g, c
  misc_feature (180)..(202): n = a, t, g, c

SEQ ID NO: 97 - DNA, 405 bp, Mus musculus
  misc_feature (26)..(26): n = a, t, g, c
  misc_feature (64)..(79): n = a, t, g, c
  misc_feature (179)..(179): n = a, t, g, c
  misc_feature (210)..(210): n = a, t, g, c
  misc_feature (345)..(345): n = a, t, g, c
  misc_feature (358)..(358): n = a, t, g, c
  misc_feature (380)..(380): n = a, t, g, c
cgtgtggcgagaggtttgtcccgtgngtggggttgatttggcgtgcgcgtcggggttgttaggnnnnnnnnnnnnnnnntggggtgccagctagtgcctggagagagccggtgtgcaggtcgtggtgcagagtcggcgggtgcgtccgagggtgccgagtgtgcgagtgtgggcgtgtngcggtacgggcgggtggtgtccgcgacgggngatgtgcggcggggggttggtggtgtgtgtggtgtggggggttgggggggggcggggagagcggcggcgcgtgtctccgcggaagtgtggggtgggcgcgcgcgggaggaggtgggggatggcagttctagacgngttgtaggtcggngagaggagaaggtacggaacgngtggcgtgtttgagcgcgagaggag

SEQ ID NO: 98 - DNA, 405 bp, Mus musculus; identical to SEQ ID NO: 97
  misc_feature (26)..(26): n = a, t, g, c
  misc_feature (64)..(79): n = a, t, g, c
  misc_feature (179)..(179): n = a, t, g, c
  misc_feature (210)..(210): n = a, t, g, c
  misc_feature (345)..(345): n = a, t, g, c
  misc_feature (358)..(358): n = a, t, g, c
  misc_feature (380)..(380): n = a, t, g, c

SEQ ID NO: 99 - DNA, 306 bp, Mus musculus
  misc_feature (186)..(223): n = a, t, g, c
ttggacccgtgaagccctggcatagacctgaagaggtggcagccagtgggtggttgtttctcaatctctgtagcatgactttttaatccccaggtgtgttagtcccagcctagtttggtgctcgaggtgagaggggatttgaatctgtttgcaaattgtccaacccaccaggtcaacgtgaggggnnnnnnnnnnnnnnnnnnnnnnnnnnnnnnnnnnnnnngactgctatgtcctgagaaaagttccgatttcttttaacaaatgtcatcatgattaaggaaatgtctggcactttaatggcaa

SEQ ID NO: 100 - DNA, 306 bp, Mus musculus; identical to SEQ ID NO: 99
  misc_feature (186)..(223): n = a, t, g, c

SEQ ID NO: 101 - DNA, 326 bp, Mus musculus
  misc_feature (33)..(33): n = a, t, g, c
  misc_feature (171)..(171): n = a, t, g, c
  misc_feature (174)..(174): n = a, t, g, c
  misc_feature (287)..(301): n = a, t, g, c
aagatcttgcagaagtctcctctccctcctggnaatgtgaaaaaacttggggagacatacccaaagatttccaatgctcagaatgctgagttacggctaagatggggccaaatcatccttaagaatgactaccaagaggaattccagaaagtgaaggacttcctgcagagncanggaaagcagaagtacactctgcctctgtaccacgccatgatgggtggcagtgagatggcccggaccctggccaaggacacctttgccgccactgcttcccagctccacagcannnnnnnnnnnnnnntccagcagatcctggcgcccaagga

SEQ ID NO: 102 - DNA, 326 bp, Mus musculus; identical to SEQ ID NO: 101
  misc_feature (33)..(33): n = a, t, g, c
  misc_feature (171)..(171): n = a, t, g, c
  misc_feature (174)..(174): n = a, t, g, c
  misc_feature (287)..(301): n = a, t, g, c

SEQ ID NO: 103 - DNA, 61 bp, Mus musculus
taaaaagacaactggatctgttgtccgtattatatttgcaatctgaaatttgtgtgaattg

SEQ ID NO: 104 - DNA, 61 bp, Mus musculus; identical to SEQ ID NO: 103

SEQ ID NO: 105 - DNA, 457 bp, Mus musculus
  misc_feature (296)..(296): n = a, t, g, c
  misc_feature (342)..(342): n = a, t, g, c
  misc_feature (371)..(371): n = a, t, g, c
  misc_feature (396)..(396): n = a, t, g, c
  misc_feature (399)..(413): n = a, t, g, c
  misc_feature (417)..(417): n = a, t, g, c
ccataattgatgtctggcattgatttgaaacttgatagctgaatgtctcttaactggcccatcgctggttcttcagagagaaccgtatgttctagtgggggaaggactggttttgggttctgtacattccacgggaacttgcttccctctcctgcccctcctgctgactgggtttgtagcattggcctcttaagcaatgccagcctaatgcccatgctccatactactgccttttgattcttactgtggctaaccttgaacctttcctataggaaatgtgatcagatcagagacanttgatcgttgggagtcagccctcaaggcctggcgacttccaggatnttggagttgctagaggaaaagtagttatnccctataggcggcatgagagacaanggnnnnnnnnnnnnnnncaantcctaccgtggaggaggagttccactgaccttgtgtagaa

SEQ ID NO: 106 - DNA, 457 bp, Mus musculus; identical to SEQ ID NO: 105
  misc_feature (296)..(296): n = a, t, g, c
  misc_feature (342)..(342): n = a, t, g, c
  misc_feature (371)..(371): n = a, t, g, c
  misc_feature (396)..(396): n = a, t, g, c
  misc_feature (399)..(413): n = a, t, g, c
  misc_feature (417)..(417): n = a, t, g, c

SEQ ID NO: 107 - DNA, 496 bp, Mus musculus
  misc_feature (48)..(48): n = a, t, g, c
  misc_feature (170)..(171): n = a, t, g, c
  misc_feature (173)..(173): n = a, t, g, c
  misc_feature (176)..(176): n = a, t, g, c
  misc_feature (179)..(179): n = a, t, g, c
  misc_feature (186)..(186): n = a, t, g, c
  misc_feature (190)..(191): n = a, t, g, c
  misc_feature (195)..(198): n = a, t, g, c
  misc_feature (201)..(202): n = a, t, g, c
  misc_feature (204)..(204): n = a, t, g, c
  misc_feature (211)..(211): n = a, t, g, c
  misc_feature (217)..(217): n = a, t, g, c
  misc_feature (220)..(220): n = a, t, g, c
  misc_feature (233)..(233): n = a, t, g, c
  misc_feature (235)..(235): n = a, t, g, c
  misc_feature (238)..(238): n = a, t, g, c
  misc_feature (248)..(248): n = a, t, g, c
  misc_feature (251)..(251): n = a, t, g, c
  misc_feature (257)..(257): n = a, t, g, c
  misc_feature (267)..(267): n = a, t, g, c
  misc_feature (269)..(269): n = a, t, g, c
  misc_feature (271)..(271): n = a, t, g, c
  misc_feature (277)..(277): n = a, t, g, c
  misc_feature (279)..(279): n = a, t, g, c
  misc_feature (283)..(283): n = a, t, g, c
  misc_feature (285)..(285): n = a, t, g, c
  misc_feature (287)..(287): n = a, t, g, c
  misc_feature (315)..(315): n = a, t, g, c
  misc_feature (320)..(320): n = a, t, g, c
  misc_feature (322)..(322): n = a, t, g, c
  misc_feature (337)..(337): n = a, t, g, c
  misc_feature (339)..(339): n = a, t, g, c
  misc_feature (357)..(357): n = a, t, g, c
  misc_feature (394)..(394): n = a, t, g, c
ctgagggcatcgtcttccttatctgaagttgttgctaccaagtactgnccctgtccccagcctttgtctcccatcctccagtaacttttttaagggatggaagctgatggtgagacgatcaggacttggtggaagctttgtgtatgacttctgccttggggcaagagctnnanggnggnccaggantcanncagnnnnccnncntcacaanccccantcntaaacatggggantnttnatgatttganctntgtttntgggcacagntntntcctgncntttntnanttgtgtttttacccccacccccaggcantttantncaggaagctttgagntntgttgggccaagagtggntcaggcagatgacaaggttggattggagaaagctttntttgcaattagactagtatgtattgttgacctaaatatccaagacattcatactgagtaaatataactattttgtacatgtggacttcatgctttgtgcttt

SEQ ID NO: 108 - DNA, 496 bp, Mus musculus; identical to SEQ ID NO: 107
  misc_feature (48)..(48): n = a, t, g, c
  misc_feature (170)..(171): n = a, t, g, c
  misc_feature (173)..(173): n = a, t, g, c
  misc_feature (176)..(176): n = a, t, g, c
  misc_feature (179)..(179): n = a, t, g, c
  misc_feature (186)..(186): n = a, t, g, c
  misc_feature (190)..(191): n = a, t, g, c
  misc_feature (195)..(198): n = a, t, g, c
  misc_feature (201)..(202): n = a, t, g, c
  misc_feature (204)..(204): n = a, t, g, c
  misc_feature (211)..(211): n = a, t, g, c
  misc_feature (217)..(217): n = a, t, g, c
  misc_feature (220)..(220): n = a, t, g, c
  misc_feature (233)..(233): n = a, t, g, c
  misc_feature (235)..(235): n = a, t, g, c
  misc_feature (238)..(238): n = a, t, g, c
  misc_feature (248)..(248): n = a, t, g, c
  misc_feature (251)..(251): n = a, t, g, c
  misc_feature (257)..(257): n = a, t, g, c
  misc_feature (267)..(267): n = a, t, g, c
  misc_feature (269)..(269): n = a, t, g, c
  misc_feature (271)..(271): n = a, t, g, c
  misc_feature (277)..(277): n = a, t, g, c
  misc_feature (279)..(279): n = a, t, g, c
  misc_feature (283)..(283): n = a, t, g, c
  misc_feature (285)..(285): n = a, t, g, c
  misc_feature (287)..(287): n = a, t, g, c
  misc_feature (315)..(315): n = a, t, g, c
  misc_feature (320)..(320): n = a, t, g, c
  misc_feature (322)..(322): n = a, t, g, c
  misc_feature (337)..(337): n = a, t, g, c
  misc_feature (339)..(339): n = a, t, g, c
  misc_feature (357)..(357): n = a, t, g, c
  misc_feature (394)..(394): n = a, t, g, c

SEQ ID NO: 109 - DNA, 186 bp, Mus musculus
  misc_feature (74)..(90): n = a, t, g, c
cccttccacagttgccttatgatgtgaccctctgctgccactttcctgacctgacgttatattatagagatggnnnnnnnnnnnnnnnnnaaatgaatgaaaccaaaaataagtagctgagaaaatccaatgagcgtgagcatgacaacttcctgtccttgacatcagggctttgttaatgttttc

SEQ ID NO: 110 - DNA, 186 bp, Mus musculus; identical to SEQ ID NO: 109
  misc_feature (74)..(90): n = a, t, g, c

SEQ ID NO: 111 - DNA, 377 bp, Mus musculus
  misc_feature (65)..(65): n = a, t, g, c
  misc_feature (105)..(120): n = a, t, g, c
  misc_feature (202)..(202): n = a, t, g, c
cttgatcaagatggacaggagactggagctgatgatgtgttttgccgtgaacaagttcctcaggnttctcgaaagctcatggtggtatggcttgtggaacgtcgnnnnnnnnnnnnnnnnacaccagaggcacaagctcgtcattgaaatagtggctgagaacaccaagacctccctgaggaaagctctaaaggactctgtnctccctcccgaaattcactgagaagagtctggctcaccctcaggtggaattcaggctgcctcagggtctttttgcttagagccctagctagtcactagaaaggaacaacagctgaggcaacagcttgtaatgatgcttaataattttagaggaaatggcccatcttcctatattc

SEQ ID NO: 112 - DNA, 377 bp, Mus musculus; identical to SEQ ID NO: 111
  misc_feature (65)..(65): n = a, t, g, c
  misc_feature (105)..(120): n = a, t, g, c
  misc_feature (202)..(202): n = a, t, g, c

SEQ ID NO: 113 - DNA, 245 bp, Mus musculus
ccctcggaacaggaaagagaagtcttcgtaatggatcggaagctgactgattattgtccccaaagaatctgctttctgctctatctttcagcactagcaatttttcttttctaaaaatacagtttatgctctttgatttctgctgttgtcctgttcctgcatcgtaaagggcattgaggggaggataatcactctgagtgagaacattgtagcttagactcagctacctgccttcagaatagttt

SEQ ID NO: 114 - DNA, 245 bp, Mus musculus; identical to SEQ ID NO: 113

SEQ ID NO: 115 - DNA, 432 bp, Mus musculus
  misc_feature (122)..(155): n = a, t, g, c
  misc_feature (188)..(188): n = a, t, g, c
  misc_feature (197)..(197): n = a, t, g, c
  misc_feature (202)..(202): n = a, t, g, c
  misc_feature (211)..(211): n = a, t, g, c
  misc_feature (219)..(219): n = a, t, g, c
  misc_feature (229)..(229): n = a, t, g, c
  misc_feature (237)..(237): n = a, t, g, c
  misc_feature (241)..(241): n = a, t, g, c
  misc_feature (243)..(243): n = a, t, g, c
  misc_feature (247)..(247): n = a, t, g, c
  misc_feature (274)..(274): n = a, t, g, c
  misc_feature (285)..(285): n = a, t, g, c
  misc_feature (293)..(293): n = a, t, g, c
  misc_feature (315)..(315): n = a, t, g, c
  misc_feature (317)..(317): n = a, t, g, c
  misc_feature (319)..(319): n = a, t, g, c
  misc_feature (322)..(322): n = a, t, g, c
  misc_feature (324)..(324): n = a, t, g, c
  misc_feature (326)..(326): n = a, t, g, c
  misc_feature (328)..(328): n = a, t, g, c
  misc_feature (354)..(354): n = a, t, g, c
  misc_feature (356)..(356): n = a, t, g, c
  misc_feature (361)..(361): n = a, t, g, c
  misc_feature (383)..(383): n = a, t, g, c
  misc_feature (402)..(402): n = a, t, g, c
ttcggtgctgactgctcccgcggctctttacgctgagatgtttcactgacttctgcctgagatctggaaaaggaacactgcccaatagatgaacatgtgtgaaaaataacttccaaggaacnnnnnnnnnnnnnnnnnnnnnnnnnnnnnnnnnntgtcagtcactgcgggaatgtgcctccctgatngccgcgatngcccnctgccgcangctgtttntccttcacangcataggntccntntctngcatgggagggagcagacccagggganaccagaccaanttgagttnacatgggttgactatccacacntntntcntntntntttggtatcccgtgaagtgtgctgtntntcctntaccctgtgattcctgttcatntcaggaagcagctgaaagngtcaggaaggtcctgggacattaaactact

SEQ ID NO: 116 - DNA, 432 bp, Mus musculus; identical to SEQ ID NO: 115
  misc_feature (122)..(155): n = a, t, g, c
  misc_feature (188)..(188): n = a, t, g, c
  misc_feature (197)..(197): n = a, t, g, c
  misc_feature (202)..(202): n = a, t, g, c
  misc_feature (211)..(211): n = a, t, g, c
  misc_feature (219)..(219): n = a, t, g, c
  misc_feature (229)..(229): n = a, t, g, c
  misc_feature (237)..(237): n = a, t, g, c
  misc_feature (241)..(241): n = a, t, g, c
  misc_feature (243)..(243): n = a, t, g, c
  misc_feature (247)..(247): n = a, t, g, c
  misc_feature (274)..(274): n = a, t, g, c
  misc_feature (285)..(285): n = a, t, g, c
  misc_feature (293)..(293): n = a, t, g, c
  misc_feature (315)..(315): n = a, t, g, c
  misc_feature (317)..(317): n = a, t, g, c
  misc_feature (319)..(319): n = a, t, g, c
  misc_feature (322)..(322): n = a, t, g, c
  misc_feature (324)..(324): n = a, t, g, c
  misc_feature (326)..(326): n = a, t, g, c
  misc_feature (328)..(328): n = a, t, g, c
  misc_feature (354)..(354): n = a, t, g, c
  misc_feature (356)..(356): n = a, t, g, c
  misc_feature (361)..(361): n = a, t, g, c
  misc_feature (383)..(383): n = a, t, g, c
  misc_feature (402)..(402): n = a, t, g, c

SEQ ID NO: 117 - DNA, 504 bp, Mus musculus
  misc_feature (32)..(32): n = a, t, g, c
  misc_feature (37)..(37): n = a, t, g, c
  misc_feature (110)..(110): n = a, t, g, c
  misc_feature (121)..(122): n = a, t, g, c
  misc_feature (135)..(135): n = a, t, g, c
  misc_feature (138)..(138): n = a, t, g, c
  misc_feature (292)..(292): n = a, t, g, c
  misc_feature (297)..(297): n = a, t, g, c
  misc_feature (321)..(321): n = a, t, g, c
  misc_feature (329)..(329): n = a, t, g, c
  misc_feature (335)..(335): n = a, t, g, c
  misc_feature (338)..(338): n = a, t, g, c
  misc_feature (340)..(340): n = a, t, g, c
  misc_feature (389)..(389): n = a, t, g, c
  misc_feature (406)..(406): n = a, t, g, c
gtacagaccaaacagtacaaagccctcaaaantcacnagttggaagtcactccaaagaatgagcacaaagcaatcctaaagacactgaaggacgagcagacgaggaagcnggccattttgnncgagcagtatgancanagtataaacgagatgatggcctctcaagcgttacggctagacgaggcacaagaggcagagtgccaggccttgagactacagctccagcaggagatggagctgctcaacgcctaccagagcaaaatcaagatgcaaacggaggcccagcacgagngcganctacagaagctagagcagagggtntccctgcncagagngcntnttgagcagaagattgaagaggagctggctgccctgcagaaggaacgcantgagaggatcaagactntcctggagagacaagagcgagagaccgagacttttgacatggagagcctcagaatgggctttgggaatttggtgacattagattttcctaaggaggac

SEQ ID NO: 118 - DNA, 504 bp, Mus musculus; identical to SEQ ID NO: 117
  misc_feature (32)..(32): n = a, t, g, c
  misc_feature (37)..(37): n = a, t, g, c
  misc_feature (110)..(110): n = a, t, g, c
  misc_feature (121)..(122): n = a, t, g, c
  misc_feature (135)..(135): n = a, t, g, c
  misc_feature (138)..(138): n = a, t, g, c
  misc_feature (292)..(292): n = a, t, g, c
  misc_feature (297)..(297): n = a, t, g, c
  misc_feature (321)..(321): n = a, t, g, c
  misc_feature (329)..(329): n = a, t, g, c
  misc_feature (335)..(335): n = a, t, g, c
  misc_feature (338)..(338): n = a, t, g, c
  misc_feature (340)..(340): n = a, t, g, c
  misc_feature (389)..(389): n = a, t, g, c
  misc_feature (406)..(406): n = a, t, g, c

SEQ ID NO: 119 - DNA, 143 bp, Mus musculus
caagctagctatatacagagggaagtgacccttctgggtttgttaaaatctgtgatcgttcccccctttgtggcccttttctttcacccttctaggagagccaccgtgatatcatcccactggcttccaactgacccacaatg

SEQ ID NO: 120 - DNA, 48 bp, Mus musculus
ccaggttctcgaaatggtccagccttttcttcccaagatctgggctgc

SEQ ID NO: 121 - DNA, 466 bp, Mus musculus
  misc_feature (26)..(45): n is a, c, g, or t
  misc_feature (321)..(321): n is a, c, g, or t
ggagcaacaccttcacagtcaaggcnnnnnnnnnnnnnnnnnnnnctgagaaagggaacaagagcccgtcacctcctccagatggctcccctgctgctacccctgagatcagagtgaaccatgagccagagccggccagtggggcctcacccggggctaccatccccaagtccccatctcagccagcagaggcctccgaggtggtgggtggagcccaggagccaggggagacagcagccagtgaagcaacctccagctctcttccggctgtggtggtggagaccttctccgcaactgtgaatggggcggtggagggcagcnctgggactggacgcttggacctgcccccgggattcatgttcaaggttcaagcccagcatgattacacggccactgacactgatgagctgcaactcaaagctggcgatgtggtgttggtgattcctttccagaacccagaggagca

SEQ ID NO: 122 - DNA, 466 bp, Mus musculus; identical to SEQ ID NO: 121
  misc_feature (26)..(45): n is a, c, g, or t
  misc_feature (321)..(321): n is a, c, g, or t

SEQ ID NO: 123 - DNA, 453 bp, Mus musculus
  misc_feature (32)..(32): n is a, c, g, or t
  misc_feature (48)..(62): n is a, c, g, or t
  misc_feature (128)..(142): n is a, c, g, or t
  misc_feature (299)..(323): n is a, c, g, or t
  misc_feature (399)..(428): n is a, c, g, or t
tgctgagtgtgcttcccgtccgaggccaccgnccctgcccctccaccnnnnnnnnnnnnnnnctgccttgagacagtgaccgagtaccacctttcccccttggttctgctgccctactcaagcagggnnnnnnnnnnnnnnntaggggccagggtaggggattggggagattccacataatgggcactccagggacacagcttgggacacagtctcacacagcctcttctaatgggctctcggggccatttgtaataacagctgcagttccctggatagacagagttgatttcctcctnnnnnnnnnnnnnnnnnnnnnnnnngcctttgtaagggaaggaaccctagtagaaaatgtgaccctccaaatgggaaagctgcaggtttttctgctattgnnnnnnnnnnnnnnnnnnnnnnnnnnnnnnctctgagcgaccatttcgttttagt

SEQ ID NO: 124 - DNA, 453 bp, Mus musculus; identical to SEQ ID NO: 123
  misc_feature (32)..(32): n is a, c, g, or t
  misc_feature (48)..(62): n is a, c, g, or t
  misc_feature (128)..(142): n is a, c, g, or t
  misc_feature (299)..(323): n is a, c, g, or t
  misc_feature (399)..(428): n is a, c, g, or t

SEQ ID NO: 125 - DNA, 550 bp, Mus musculus
  misc_feature (29)..(60): n is a, c, g, or t
  misc_feature (124)..(125): n is a, c, g, or t
  misc_feature (127)..(128): n is a, c, g, or t
  misc_feature (130)..(130): n is a, c, g, or t
  misc_feature (132)..(133): n is a, c, g, or t
  misc_feature (137)..(137): n is a, c, g, or t
  misc_feature (202)..(202): n is a, c, g, or t
  misc_feature (238)..(238): n is a, c, g, or t
  misc_feature (258)..(258): n is a, c, g, or t
  misc_feature (294)..(294): n is a, c, g, or t
  misc_feature (312)..(312): n is a, c, g, or t
  misc_feature (315)..(315): n is a, c, g, or t
  misc_feature (317)..(317): n is a, c, g, or t
  misc_feature (378)..(391): n is a, c, g, or t
  misc_feature (393)..(394): n is a, c, g, or t
  misc_feature (412)..(426): n is a, c, g, or t
  misc_feature (482)..(514): n is a, c, g, or t
ttggaccactatattgtgtgtttgctaannnnnnnnnnnnnnnnnnnnnnnnnnnnnnnnaaatgttatgccctatgtaacagcagagtaacataaaaataaaactacattttataaaaccatnnannangnntttntaacaattgcatacccatattttaaggaacagaatttactactttttgaaggcttttgctgtttntctttatgtaacatgtagtggtgatacccatatttntgcattgtggtacacttgtntaaggtgcctggcactgtaaagttggactatatttntccagatagcctcatggntcntnttcctcagatgtaatgataatctggttagacatcatatgaaataaagtgatgtgatgatgnnnnnnnnnnnnnnannagaattgggctttagttnnnnnnnnnnnnnnngtatctagttttcagataacccacttaggattctgtctacactcaaaatgatgttnnnnnnnnnnnnnnnnnnnnnnnnnnnnnnnnntgagaagtgatcttcaaggcaacatgattagaaaaa

SEQ ID NO: 126 - DNA, 550 bp, Mus musculus; identical to SEQ ID NO: 125
  misc_feature (29)..(60): n is a, c, g, or t
  misc_feature (124)..(125): n is a, c, g, or t
  misc_feature (127)..(128): n is a, c, g, or t
  misc_feature (130)..(130): n is a, c, g, or t
  misc_feature (132)..(133): n is a, c, g, or t
  misc_feature (137)..(137): n is a, c, g, or t
  misc_feature (202)..(202): n is a, c, g, or t
  misc_feature (238)..(238): n is a, c, g, or t
  misc_feature (258)..(258): n is a, c, g, or t
  misc_feature (294)..(294): n is a, c, g, or t
  misc_feature (312)..(312): n is a, c, g, or t
  misc_feature (315)..(315): n is a, c, g, or t
  misc_feature (317)..(317): n is a, c, g, or t
  misc_feature (378)..(391): n is a, c, g, or t
  misc_feature (393)..(394): n is a, c, g, or t
  misc_feature (412)..(426): n is a, c, g, or t
  misc_feature (482)..(514): n is a, c, g, or t

SEQ ID NO: 127 - DNA, 332 bp, Mus musculus
  misc_feature (42)..(42): n is a, c, g, or t
  misc_feature (56)..(56): n is a, c, g, or t
  misc_feature (139)..(139): n is a, c, g, or t
  misc_feature (162)..(162): n is a, c, g, or t
  misc_feature (174)..(174): n is a, c, g, or t
  misc_feature (223)..(224): n is a, c, g, or t
  misc_feature (227)..(227): n is a, c, g, or t
  misc_feature (229)..(229): n is a, c, g, or t
tcaacaagctgctgggcaaagtgacgatcgcgcagggcggcntcctgcccaacatncaggccgtgctgctgcccaagaagacggagagccaccataaggcgaagggcaagtgaggccactgctcgcgtcggcccgcgtntctgtgatataacccccgcgagntcctaaaaaggntcttttcagagccacccactgaatcagataaagagttgtgtcacggtanncgntnttggtggcctttcctggccctgccccaaaagtgaaaaaaaaaaaaaaaaaaaaaaaaaaaaaaaaaaaaaaaaaaaaaactcgagggccgatttgggcaatcg

SEQ ID NO: 128 - DNA, 332 bp, Mus musculus; identical to SEQ ID NO: 127
  misc_feature (42)..(42): n is a, c, g, or t
  misc_feature (56)..(56): n is a, c, g, or t
  misc_feature (139)..(139): n is a, c, g, or t
  misc_feature (162)..(162): n is a, c, g, or t
  misc_feature (174)..(174): n is a, c, g, or t
  misc_feature (223)..(224): n is a, c, g, or t
  misc_feature (227)..(227): n is a, c, g, or t
  misc_feature (229)..(229): n is a, c, g, or t

SEQ ID NO: 129 - DNA, 284 bp, Mus musculus
  misc_feature (30)..(30): n is a, c, g, or t
  misc_feature (53)..(53): n is a, c, g, or t
  misc_feature (65)..(65): n is a, c, g, or t
  misc_feature (114)..(115): n is a, c, g, or t
  misc_feature (118)..(118): n is a, c, g, or t
  misc_feature (120)..(120): n is a, c, g, or t
gtgaggccactgctcgcgtcggcccgcgtntctgtgatataacccccgcgagntcctaaaaaggntcttttcagagccacccactgaatcagataaagagttgtgtcacggtanncgntnttggtggcctttcctggccctgccccaaaagtgaaaaaaaaaaaaaaaaaaaaaaaaaaaaaaaaaaaaaaaaaaaaaactcgagggccgatttgggcaatcgagggggggcccggtacccaattcgccctatattaaatcgtattagaattcactgggggtcg

SEQ ID NO: 130 - DNA, 284 bp, Mus musculus; identical to SEQ ID NO: 129
  misc_feature (30)..(30): n is a, c, g, or t
  misc_feature (53)..(53): n is a, c, g, or t
  misc_feature (65)..(65): n is a, c, g, or t
  misc_feature (114)..(115): n is a, c, g, or t
  misc_feature (118)..(118): n is a, c, g, or t
  misc_feature (120)..(120): n is a, c, g, or t

SEQ ID NO: 131 - DNA, 524 bp, Mus musculus
  misc_feature (136)..(136): n is a, c, g, or t
  misc_feature (203)..(203): n is a, c, g, or t
  misc_feature (241)..(241): n is a, c, g, or t
  misc_feature (324)..(324): n is a, c, g, or t
aacatgaccttccagctcaggggccccactcactctctccctcttttccatggttttcagaggcctgtgctctgcccaccccaccctgcaaattcctctccaggccatcctcaggccagcctactgaggggcggancatttctggaggtttccatgacacttgccctgggggggagcggggagatgaaaactccctgaccccntctgggtgaatattttctgcctccagttggagggtggnctgcctggggtgacccccgctgtgaactgtacagatcagatgtacccaggagaagcagctagattatttcggtttaaatacantactccatcaattcagtcagaattgaatttccaggggactgcagaggcttctccctggccgcaatgctgcaataagagatttctgttctctgtgtcttagtctcaacaccacacaggcccattcagtaaagcggagcctacgtcgtcttgctcctcttgtgcccaagtcctttcctcctgtgacaatgctagtggcatgg

SEQ ID NO: 132 - DNA, 524 bp, Mus musculus; identical to SEQ ID NO: 131
  misc_feature (136)..(136): n is a, c, g, or t
  misc_feature (203)..(203): n is a, c, g, or t
  misc_feature (241)..(241): n is a, c, g, or t
  misc_feature (324)..(324): n is a, c, g, or t

SEQ ID NO: 133 - DNA, 491 bp, Mus musculus
  misc_feature (323)..(323): n is a, c, g, or t
  misc_feature (383)..(383): n is a, c, g, or t
  misc_feature (395)..(395): n is a, c, g, or t
  misc_feature (397)..(397): n is a, c, g, or t
  misc_feature (417)..(417): n is a, c, g, or t
  misc_feature (430)..(458): n is a, c, g, or t
accatggttctcattagtaacttagagggctcagtgctacttctaggacctttagtctctgaaatctgggaaaaatgtttatttgcatagtttgttagtgcctcttaaatgtcaaacaggaatacatttcagtagaaactttaatttcattttcaattgtttgtaaattcatcagtatttagtaaattgatcttttttttatatttctgcttccaatgcaggtgcaatttaatataatagactttttaaagaaattaatgctaacatcattcttgagctttttatataaatatatttaatttggaagcgtgtgtgtgcacatntcatatatatatacctgataattgtcagataaggcacagaaatgttcatcacaccaattnttccttataagntnttccatgtgcttcagacatntgatggacttggnnnnnnnnnnnnnnnnnnnnnnnnnnnnntatgttcagactgtaacctgcttactgatggta

SEQ ID NO: 134 - DNA, 491 bp, Mus musculus; identical to SEQ ID NO: 133
  misc_feature (323)..(323): n is a, c, g, or t
  misc_feature (383)..(383): n is a, c, g, or t
  misc_feature (395)..(395): n is a, c, g, or t
  misc_feature (397)..(397): n is a, c, g, or t
  misc_feature (417)..(417): n is a, c, g, or t
  misc_feature (430)..(458): n is a, c, g, or t

SEQ ID NO: 135 - DNA, 297 bp, Mus musculus
  misc_feature (110)..(110): n is a, c, g, or t
tgcctggagtggactaagtgacagacaatgtcttcacacatctcctgtgacatccagagccctcagttttctttagtcaagtatctgatgttccctgtgagcctatgggntcaaagtgaagaactgtgcagcccagcctgccctgcacacagaaccctgtccctgcactgccctgggttcccttccacagccaaccttgctgctccagccaaacactgggcgacatctgcatcctgccagctccatgctgccctgagctgcagctcctcacttccacactgagagtaagaatctgaa

SEQ ID NO: 136 - DNA, 297 bp, Mus musculus; identical to SEQ ID NO: 135
  misc_feature (110)..(110): n is a, c, g, or t

SEQ ID NO: 137 - DNA, 261 bp, Mus musculus
  misc_feature (46)..(69): n is a, c, g, or t
gcggctcgctcgtggctacccatgactactatcggcgacgcctggnnnnnnnnnnnnnnnnnnnnnnnngcggaagtgccgagtaccctggggacgccgtgctccagtccccgggtcttcccaaagccgacccgggccactggtgggccagcttctttttcgggaaatccacactcccgttcatgactacagtgttggagtctcctgagcgctcggcagaatccccccaggtctccagaagcccgatgacctgtggcctga

SEQ ID NO: 138 - DNA, 261 bp, Mus musculus; identical to SEQ ID NO: 137
  misc_feature (46)..(69): n is a, c, g, or t

SEQ ID NO: 139 - DNA, 601 bp, Mus musculus
  misc_feature (79)..(79): n is a, c, g, or t
  misc_feature (88)..(108): n is a, c, g, or t
  misc_feature (225)..(225): n is a, c, g, or t
  misc_feature (380)..(380): n is a, c, g, or t
  misc_feature (391)..(391): n is a, c, g, or t
  misc_feature (411)..(412): n is a, c, g, or t
ggctgccatttccaaaaaaccctgaccagcgtggcgacctactgatagaatttgatgtgtccttcccagacgtcatatntgcagcatnnnnnnnnnnnnnnnnnnnnnatctccctgcctcctaggatgagaagaaccttgctatccatagtttgataagacactgaaaatataaaagtaccggcagttgactgctgtgaattctgtgtaaagatgtgtaaactnttctgagggctcattaaactgcatgaatagacacagttcaaataggcaacgtgggtttttacagtagggatgaaaagtcattcactgtatttcatttctcccaaatcagaaatttttagtatttcatttacaagtaaaagttggttttgtggtcnatggatatacntctagtaaatactagattannccagtaccgtgtgcatgtgcgtgtgtgtgtgtgtgtgtgtgtgtaccccccctgtggggtccgggtggcccccggtccggggggggaaccttaaaagggtccgtgtaaaaggccccttaataaaaattaaaattcctaggggaaatgaaatatgtgagaataaaagccaagttctacgaaatgcagtca

SEQ ID NO: 140 - DNA, 601 bp, Mus musculus; identical to SEQ ID NO: 139
  misc_feature (79)..(79): n is a, c, g, or t
  misc_feature (88)..(108): n is a, c, g, or t
  misc_feature (225)..(225): n is a, c, g, or t
  misc_feature (380)..(380): n is a, c, g, or t
  misc_feature (391)..(391): n is a, c, g, or t
  misc_feature (411)..(412): n is a, c, g, or t

SEQ ID NO: 141 - DNA, 567 bp, Mus musculus
  misc_feature (177)..(177): n is a, c, g, or t
  misc_feature (298)..(315): n is a, c, g, or t
  misc_feature (395)..(528): n is a, c, g, or t
accgtagagcgcaccggtgacacggggatgctgccagccaactacgtggaggccatctgaaccctgtgccgccccgccctgtcttcaatgcattccatggcatcacatctgtcctggggcctgacccgtccacccttcagtgtctctgtcttttaagatcttcaactgcttctttanccccgcccctccagcttattttaccatcccaagccttgttctgcccctgtcatgggctccttcctctggcaggttttcccttggaccaatcaactgattgatttttctctctggatggaannnnnnnnnnnnnnnnnngagggcaggattgttcttagctaggtagactcccagggctgggctgaactaggagacccactaaggagatcagtttagannnnnnnnnnnnnnnnnnnnnnnnnnnnnnnnnnnnnnnnnnnnnnnnnnnnnnnnnnnnnnnnnnnnnnnnnnnnnnnnnnnnnnnnnnnnnnnnnnnnnnnnnnnnnnnnnnnnnnnnnnnnnnnnnnnnnngaggaagagtgggggttggttagctctcagcttcacttc

SEQ ID NO: 142 - DNA, 567 bp, Mus musculus; identical to SEQ ID NO: 141
  misc_feature (177)..(177): n is a, c, g, or t
  misc_feature (298)..(315): n is a, c, g, or t
  misc_feature (395)..(528): n is a, c, g, or t

SEQ ID NO: 143 - DNA, 235 bp, Mus musculus
  misc_feature (82)..(82): n is a, c, g, or t
  misc_feature (148)..(174): n is a, c, g, or t
tgagatgcagaagctggacgcccaggtcaaggagctggtcctgaagtcggcggtagaagcagagaggctggtggctggcaanctcaagaaggatacgtacctggaaaacgagaagctcagctcaggaaaacgccaggagctggtcacnnnnnnnnnnnnnnnnnnnnnnnnnnngtagctcctggctccagagcaggcccaggtgcctagacttccagtggcattggataggtag

SEQ ID NO: 144 - DNA, 235 bp, Mus musculus; identical to SEQ ID NO: 143
  misc_feature (82)..(82): n is a, c, g, or t
  misc_feature (148)..(174): n is a, c, g, or t

SEQ ID NO: 145 - DNA, 348 bp, Mus musculus
  misc_feature (180)..(211): n is a, c, g, or t
acagctgctgtgtggcgagcacaaatcagagaacgaggaggaactagaaaaagagctataccaagaggctcgggagtgcctaacccttctctctcagcgtctgggctctcagaagttcttctttggggatgcccctgcctccctggacgcctttgtttttagccatttggccctgctgcnnnnnnnnnnnnnnnnnnnnnnnnnnnnnnnngcccaccttcgggggctgcacaacctctgcgcctactgcacccacatcctcaacctctactttccccgggatggagatgaggtgccacttccacgccagacaccagcagcccctgagaccgaggaggagccataccg

SEQ ID NO: 146 - DNA, 348 bp, Mus musculus; identical to SEQ ID NO: 145
  misc_feature (180)..(211): n is a, c, g, or t

SEQ ID NO: 147 - DNA, 532 bp, Mus musculus
  misc_feature (29)..(29): n is a, c, g, or t
  misc_feature (31)..(37): n is a, c, g, or t
  misc_feature (39)..(40): n is a, c, g, or t
  misc_feature (42)..(42): n is a, c, g, or t
  misc_feature (44)..(45): n is a, c, g, or t
  misc_feature (47)..(49): n is a, c, g, or t
  misc_feature (52)..(53): n is a, c, g, or t
  misc_feature (56)..(59): n is a, c, g, or t
  misc_feature (98)..(98): n is a, c, g, or t
  misc_feature (101)..(104): n is a, c, g, or t
  misc_feature (110)..(111): n is a, c, g, or t
  misc_feature (114)..(119): n is a, c, g, or t
  misc_feature (122)..(122): n is a, c, g, or t
  misc_feature (125)..(125): n is a, c, g, or t
  misc_feature (146)..(146): n is a, c, g, or t
  misc_feature (162)..(162): n is a, c, g, or t
  misc_feature (166)..(166): n is a, c, g, or t
  misc_feature (170)..(170): n is a, c, g, or t
  misc_feature (178)..(178): n is a, c, g, or t
  misc_feature (182)..(202): n is a, c, g, or t
  misc_feature (255)..(255): n is a, c, g, or t
  misc_feature (259)..(259): n is a, c, g, or t
  misc_feature (305)..(305): n is a, c, g, or t
cagcattaccctgaacgccatggaggacntnnnnnnnanngncnngnnnctnnagnnnnctggggctatggttcgaacaagagattgagtgaaggccnggnnnngccccnnccnnnnnngcntgnctggggggagcatggccggcngacttgaagatgaccngggnatgncagggcanggcnnnnnnnnnnnnnnnnnnnnntgatcataagaggtggcaaggtggtgagaggagcatgtctggccactcggggnctgngtcacatgatgaaccgtggtggcatgtcagggcgaggcagttttgncccaggaggagcttctcgtggccatgtgatcccacgtggagggatgcaggcaggctttggaggacagagccggggaagcagacccagtgatgcccgcttcacccgccgctattgagcacctaagccacccaaccgtgaccttcaagtcctatcaggacttccctcccaccattgtacaaaggaattttttttttatctgctgccatattgtagcttgttacgatgtg

SEQ ID NO: 148 - DNA, 532 bp, Mus musculus; identical to SEQ ID NO: 147
  misc_feature (29)..(29): n is a, c, g, or t
  misc_feature (31)..(37): n is a, c, g, or t
  misc_feature (39)..(40): n is a, c, g, or t
  misc_feature (42)..(42): n is a, c, g, or t
  misc_feature (44)..(45): n is a, c, g, or t
  misc_feature (47)..(49): n is a, c, g, or t
  misc_feature (52)..(53): n is a, c, g, or t
  misc_feature (56)..(59): n is a, c, g, or t
  misc_feature (98)..(98): n is a, c, g, or t
  misc_feature (101)..(104): n is a, c, g, or t
  misc_feature (110)..(111): n is a, c, g, or t
  misc_feature (114)..(119): n is a, c, g, or t
  misc_feature (122)..(122): n is a, c, g, or t
  misc_feature (125)..(125): n is a, c, g, or t
  misc_feature (146)..(146): n is a, c, g, or t
  misc_feature (162)..(162): n is a, c, g, or t
  misc_feature (166)..(166): n is a, c, g, or t
  misc_feature (170)..(170): n is a, c, g, or t
  misc_feature (178)..(178): n is a, c, g, or t
  misc_feature (182)..(202): n is a, c, g, or t
  misc_feature (255)..(255): n is a, c, g, or t
  misc_feature (259)..(259): n is a, c, g, or t
  misc_feature (305)..(305): n is a, c, g, or t

SEQ ID NO: 149 - DNA, 373 bp, Mus musculus
  misc_feature (86)..(87): n is a, c, g, or t
  misc_feature (90)..(90): n is a, c, g, or t
  misc_feature (160)..(174): n is a, c, g, or t
  misc_feature (346)..(346): n is a, c, g, or t
gtgaggcatctgcatcatttgcaacgtgcaggagcctacctgtcttgctgcctgcacctcagggtgtgcagagcattgggctgctnngcngctgtgggggttaggtctagggaattcctggctcattataaggcatcaggactgtggatagagtgcccannnnnnnnnnnnnnnttcaagaggtcagcaagaggtacattagagatggagactacactgggtagattctagtttttagttcttattaatgtgggggagtaaattaataagtgtaatatgattctgatgtctgttagactttctctgtgctctgtaaatgtggatacttgagtaaagtggactacgnagtggatgtgggcgtcactgttagtct

SEQ ID NO: 150 - DNA, 373 bp, Mus musculus; identical to SEQ ID NO: 149
  misc_feature (86)..(87): n is a, c, g, or t
  misc_feature (90)..(90): n is a, c, g, or t
  misc_feature (160)..(174): n is a, c, g, or t
  misc_feature (346)..(346): n is a, c, g, or t

SEQ ID NO: 151 - DNA, 234 bp, Mus musculus
gattgttttcaaactttaagctcagcaattttgaacactgaaaatattcatctaggatgtaataacaagttcagtattgaccataactgtcaactcccctttgagctttcctcaagttagttatgttgtaggagtgtacttaagcagcaagcatatttaggtttaaagcagtttcacttacgttaaatgttgctcttataccacaatacatcgaaaacttcagatgcatgttga

SEQ ID NO: 152 - DNA, 234 bp, Mus musculus; identical to SEQ ID NO: 151

SEQ ID NO: 153 - DNA, 174 bp, Mus musculus
  misc_feature (134)..(135): n is a, c, g, or t
  misc_feature (138)..(138): n is a, c, g, or t
tccattgagccttatctgaagaagaaggatgagtcccaggagggcaagcaacagtatctgcagtccatcgaggaccgggagaagctggacgggctgtacgagtgcatcctgtgtgcctgctgcagcaccagctnnccnagctactggtggaacggagacaagtacctggggcct

SEQ ID NO: 154 - DNA, 174 bp, Mus musculus; identical to SEQ ID NO: 153
  misc_feature (134)..(135): n is a, c, g, or t
  misc_feature (138)..(138): n is a, c, g, or t

SEQ ID NO: 155 - DNA, 331 bp, Mus musculus
  misc_feature (36)..(36): n is a, c, g, or t
  misc_feature (47)..(76): n is a, c, g, or t
  misc_feature (165)..(165): n is a, c, g, or t
  misc_feature (283)..(298): n is a, c, g, or t
atccagaaagccagggagtgtggtcttctcagttantacgtcccccnnnnnnnnnnnnnnnnnnnnnnnnnnnnnnactgtgcatggagctgtcagtgtgactccaccagcccccacactgttgtcaggtgaaccttggtacccatggtacagctggcaacagcnaccagagagagagctgtctcgccttcgccgactctatcaaggaaatctcctagaagaaagtggcccgccacctgagtcgatgccagagatgcccactacaccaccagcagaatcctcnnnnnnnnnnnnnnnntcccagagtgcttagaacttgtgacctggggaa

SEQ ID NO: 156 - DNA, 331 bp, Mus musculus; identical to SEQ ID NO: 155
  misc_feature (36)..(36): n is a, c, g, or t
  misc_feature (47)..(76): n is a, c, g, or t
  misc_feature (165)..(165): n is a, c, g, or t
  misc_feature (283)..(298): n is a, c, g, or t

SEQ ID NO: 157 - DNA, 299 bp, Mus musculus
  misc_feature (47)..(47): n is a, c, g, or t
  misc_feature (71)..(71): n is a, c, g, or t
  misc_feature (139)..(139): n is a, c, g, or t
  misc_feature (141)..(141): n is a, c, g, or t
  misc_feature (146)..(146): n is a, c, g, or t
  misc_feature (153)..(153): n is a, c, g, or t
  misc_feature (157)..(157): n is a, c, g, or t
  misc_feature (160)..(160): n is a, c, g, or t
  misc_feature (170)..(170): n is a, c, g, or t
  misc_feature (176)..(176): n is a, c, g, or t
  misc_feature (181)..(181): n is a, c, g, or t
  misc_feature (183)..(183): n is a, c, g, or t
  misc_feature (222)..(222): n is a, c, g, or t
  misc_feature (233)..(233): n is a, c, g, or t
  misc_feature (236)..(236): n is a, c, g, or t
  misc_feature (239)..(239): n is a, c, g, or t
  misc_feature (260)..(260): n is a, c, g, or t
ctcagatctgacagaaaagttggaggagaggatgtaccaggtgtacngccaccacagcaaaatcattcagnaaagactacaagaatttacccagaagatggcaaagatcaaccatctggaaatggagcttaaacaagtntnccaanctgtggnaacngtntacaaggacntatgtntccantntgaggttcccacttgcgaagaacagaattacaaagatgntgaatgctganttntgntaagaggcttccatctcaatntgagaaggcacagaggctgctgtttgaggcatgctgata

SEQ ID NO: 158 - DNA, 299 bp, Mus musculus; identical to SEQ ID NO: 157
  misc_feature (47)..(47): n is a, c, g, or t
  misc_feature (71)..(71): n is a, c, g, or t
  misc_feature (139)..(139): n is a, c, g, or t
  misc_feature (141)..(141): n is a, c, g, or t
  misc_feature (146)..(146): n is a, c, g, or t
  misc_feature (153)..(153): n is a, c, g, or t
  misc_feature (157)..(157): n is a, c, g, or t
  misc_feature (160)..(160): n is a, c, g, or t
  misc_feature (170)..(170): n is a, c, g, or t
  misc_feature (176)..(176): n is a, c, g, or t
  misc_feature (181)..(181): n is a, c, g, or t
  misc_feature (183)..(183): n is a, c, g, or t
  misc_feature (222)..(222): n is a, c, g, or t
  misc_feature (233)..(233): n is a, c, g, or t
  misc_feature (236)..(236): n is a, c, g, or t
  misc_feature (239)..(239): n is a, c, g, or t
  misc_feature (260)..(260): n is a, c, g, or t

SEQ ID NO: 159 - DNA, 575 bp, Mus musculus
  misc_feature (397)..(397): n is a, c, g, or t
  misc_feature (415)..(415): n is a, c, g, or t
  misc_feature (457)..(457): n is a, c, g, or t
ccctgggccactggataaacccagtcacagaagtctctctgcaggcatttaggtactgctctctgtggctgtttggagcagggatggacagggcaactttaatccataatgatcgacactgcttgtctttataggggaaactaccctgtcccgtggtgagggctgcttcaaagtctttactatcagtcactgggatgacaaattggctgcagctgagttgcgtcctgtcttccaactctaaatgggtgctagtaggtttctaatcaaatattttattacaaaatttcaaaatcagtcttttgcccaaagtgctgacatgcctataacctcaggacccaggaggctgaggcagaattgccaggcagctgcaggtcagcctagtgagacagactctgtntcaggaacaatgcagtgncctttcccacttttagaaggcttgccagcaggttccaaattntattgtgaaaataggaaagaaactacaacagtttgccttcagactgcacacctcacttgttggggggaatggggcactgcagacgttcctgccgcactgctgggctgtgtttttacca

SEQ ID NO: 160 - DNA, 575 bp, Mus musculus; identical to SEQ ID NO: 159
  misc_feature (397)..(397): n is a, c, g, or t
  misc_feature (415)..(415): n is a, c, g, or t
  misc_feature (457)..(457): n is a, c, g, or t

SEQ ID NO: 161 - DNA, 603 bp, Mus musculus
  misc_feature (75)..(75): n is a, c, g, or t
  misc_feature (140)..(182): n is a, c, g, or t
  misc_feature (184)..(191): n is a, c, g, or t
  misc_feature (201)..(202): n is a, c, g, or t
  misc_feature (207)..(208): n is a, c, g, or t
  misc_feature (210)..(212): n is a, c, g, or t
  misc_feature (217)..(217): n is a, c, g, or t
  misc_feature (224)..(224): n is a, c, g, or t
  misc_feature (232)..(232): n is a, c, g, or t
  misc_feature (238)..(238): n is a, c, g, or t
  misc_feature (240)..(241): n is a, c, g, or t
  misc_feature (245)..(245): n is a, c, g, or t
  misc_feature (247)..(247): n is a, c, g, or t
  misc_feature (257)..(257): n is a, c, g, or t
  misc_feature (268)..(268): n is a, c, g, or t
  misc_feature (274)..(274): n is a, c, g, or t
  misc_feature (279)..(298): n is a, c, g, or t
  misc_feature (300)..(300): n is a, c, g, or t
  misc_feature (302)..(302): n is a, c, g, or t
  misc_feature (316)..(316): n is a, c, g, or t
  misc_feature (456)..(456): n is a, c, g, or t
  misc_feature (458)..(458): n is a, c, g, or t
  misc_feature (466)..(471): n is a, c, g, or t
  misc_feature (473)..(475): n is a, c, g, or t
agtccaatatcctggcaacaggaggaggaaccagtgaccggcacattcgcatttggaacgtctgctcaggggccntgtctgagtgctgtggatgtgcattcccaggtgtgctccatcctctggtctccccactataaggnnnnnnnnnnnnnnnnnnnnnnnnnnnnnnnnnnnnnnnnnnntnnnnnnnntccaaccatnnccaanntnnntgagntcaaagnacacacancacggntnntggntnttacaatgantccagatgggnccacantggcnnnnnnnnnnnnnnnnnnnnantntacggttgtggcgntgctttgagatggaccctgcccttcggcgtgagcgggaaaaagccagtgtagctaaaagtagcctcatccaccaaggcatccgttgaacaaacgcatttcctttcttgtttttattttattttttctaataaagttcgtntnttccttannnnnnannnaaaaaaaaaaaaagaaaaaaaaaaaaaaagagaagaggaagaaaaaggggaaaacgcgagaaaagagagaggggaaaaaaagaaaagggggggccccccgaggggtcccaggtttgattagcgggcct

SEQ ID NO: 162 - DNA, 603 bp, Mus musculus; identical to SEQ ID NO: 161
  misc_feature (75)..(75): n is a, c, g, or t
  misc_feature (140)..(182): n is a, c, g, or t
  misc_feature (184)..(191): n is a, c, g, or t
  misc_feature (201)..(202): n is a, c, g, or t
  misc_feature (207)..(208): n is a, c, g, or t
  misc_feature (210)..(212): n is a, c, g, or t
  misc_feature (217)..(217): n is a, c, g, or t
  misc_feature (224)..(224): n is a, c, g, or t
  misc_feature (232)..(232): n is a, c, g, or t
  misc_feature (238)..(238): n is a, c, g, or t
  misc_feature (240)..(241): n is a, c, g, or t
  misc_feature (245)..(245): n is a, c, g, or t
  misc_feature (247)..(247): n is a, c, g, or t
  misc_feature (257)..(257): n is a, c, g, or t
  misc_feature (268)..(268): n is a, c, g, or t
  misc_feature (274)..(274): n is a, c, g, or t
  misc_feature (279)..(298): n is a, c, g, or t
  misc_feature (300)..(300): n is a, c, g, or t
  misc_feature (302)..(302): n is a, c, g, or t
  misc_feature (316)..(316): n is a, c, g, or t
  misc_feature (456)..(456): n is a, c, g, or t
  misc_feature (458)..(458): n is a, c, g, or t
  misc_feature (466)..(471): n is a, c, g, or t
  misc_feature (473)..(475): n is a, c, g, or t

SEQ ID NO: 163 - DNA, 538 bp, Mus musculus
  misc_feature (257)..(257): n is a, c, g, or t
  misc_feature (259)..(259): n is a, c, g, or t
cttgatagctgaatgtctcttaactggcccatcgctggttcttcagagagaaccgtatgttctagtgggggaaggactggttttgggttctgtacattccacgggaacttgcttccctctcctgcccctcctgctgactgggtttgtagcattggcctcttaagcaatgccagcctaatgcccatgctccatactagctcctttgattcttactgtggctaaccttgaaccttcctataggaaatgtgatcagatcngngacacttgatcgttgggagtcagccctcaaggcctggcgacacttgatcgttgggagtcagccctcaaggcctggcgacttccaggatcttggagttgctagaggaaaagtagttatgcccatataggcggcatgagagacaagggatcagtttacctgccaactccgaccgtggagggggagttccactgaccttgtgtagaaagatcaggaatccaggccagggtgattgaacgctgacaagaaatcactgtatatgtctctccagggcagtttctt

SEQ ID NO: 164 - DNA, 538 bp, Mus musculus; identical to SEQ ID NO: 163
  misc_feature (257)..(257): n is a, c, g, or t
  misc_feature (259)..(259): n is a, c, g, or t

SEQ ID NO: 165 - DNA, 404 bp, Mus musculus
  misc_feature (241)..(262): n is a, c, g, or t
  misc_feature (270)..(274): n is a, c, g, or t
  misc_feature (276)..(276): n is a, c, g, or t
  misc_feature (278)..(279): n is a, c, g, or t
  misc_feature (283)..(283): n is a, c, g, or t
  misc_feature (286)..(298): n is a, c, g, or t
  misc_feature (324)..(340): n is a, c, g, or t
  misc_feature (353)..(353): n is a, c, g, or t
  misc_feature (362)..(362): n is a, c, g, or t
  misc_feature (364)..(365): n is a, c, g, or t
ggtttgattttctgcgctctcagctgaatgacatctcatcttttaagaatatctacagatatgcctttgattttgcaagggataaagatcagagaagccttgatattgatactgcgaagtctatgttagctctgctgcttgggagaacatggccactcttttcagtattttaccagtacctggagcaatcaaagtatcgtgttatgaacaaagatcagtggtacaatgtattagaattcannnnnnnnnnnnnnnnnnnnnntagtaacnnnnntnannacgntgnnnnnnnnnnnnngcctgttcttcttgatgaatttgttnnnnnnnnnnnnnnnnntcaaacatcatancaagaactntnntgaagacaatgcaaaccttgtgaagacaatgcagagagg

SEQ ID NO: 166 - DNA, 404 bp, Mus musculus; identical to SEQ ID NO: 165
  misc_feature (241)..(262): n is a, c, g, or t
  misc_feature (270)..(274): n is a, c, g, or t
  misc_feature (276)..(276): n is a, c, g, or t
  misc_feature (278)..(279): n is a, c, g, or t
  misc_feature (283)..(283): n is a, c, g, or t
  misc_feature (286)..(298): n is a, c, g, or t
  misc_feature (324)..(340): n is a, c, g, or t
  misc_feature (353)..(353): n is a, c, g, or t
  misc_feature (362)..(362): n is a, c, g, or t
  misc_feature (364)..(365): n is a, c, g, or t

SEQ ID NO: 167 - DNA, 288 bp, Mus musculus
  misc_feature (197)..(197): n is a, c, g, or t
  misc_feature (200)..(209): n is a, c, g, or t
  misc_feature (211)..(211): n is a, c, g, or t
  misc_feature (213)..(219): n is a, c, g, or t
  misc_feature (254)..(254): n is a, c, g, or t
  misc_feature (260)..(260): n is a, c, g, or t
  misc_feature (263)..(263): n is a, c, g, or t
cagcggaaggtgaccccatgcaggtttatggtgtgctgtatttctgtttccggatttaacactcacagaccagactctgagaagcctggggggcctggacttgttcagtaacgtgcccttcccccactgcggatcaaagctgcgaagagtgggaaatcaggaacttttttgtaagaagacaagatgcccatggtcantcnnnnnnnnnntngnnnnnnnagagatcctgacataaacccttgcttgtcggaatntgatgnttntaccagatgcatggatgaaaataac

SEQ ID NO: 168 - DNA, 288 bp, Mus musculus; identical to SEQ ID NO: 167
  misc_feature (197)..(197): n is a, c, g, or t
  misc_feature (200)..(209): n is a, c, g, or t
  misc_feature (211)..(211): n is a, c, g, or t
  misc_feature (213)..(219): n is a, c, g, or t
  misc_feature (254)..(254): n is a, c, g, or t
  misc_feature (260)..(260): n is a, c, g, or t
  misc_feature (263)..(263): n is a, c, g, or t

SEQ ID NO: 169 - DNA, 383 bp, Mus musculus
  misc_feature (34)..(34): n is a, c, g, or t
  misc_feature (119)..(143): n is a, c, g, or t
  misc_feature (314)..(329): n is a, c, g, or t
  misc_feature (333)..(333): n is a, c, g, or t
ccttctgaggcctcctaacctgagaggctccagnctccctggaaagccctccagtcctcacagtggacaggacccgccagcccctcccgtggactaacgtcctggtgtgggaagcagcnnnnnnnnnnnnnnnnnnnnnnnnnagcgactgaagacgaccaggcactaactgtctccttttccatctgcagtttggatggtattgttttcatgagcttctagaaatttcacttgccaactgccttttgcttcctgagttgccaccgtccttatttacagtatccctgagtaaatgattctattgaaaagttgannnnnnnnnnnnnnnncctnagcttaaacattccactcgttctccctgcaaccctgactagaacgtctgt

SEQ ID NO: 170 - DNA, 383 bp, Mus musculus; identical to SEQ ID NO: 169
  misc_feature (34)..(34): n is a, c, g, or t
  misc_feature (119)..(143): n is a, c, g, or t
  misc_feature (314)..(329): n is a, c, g, or t
  misc_feature (333)..(333): n is a, c, g, or t

SEQ ID NO: 171 - DNA, 518 bp, Mus musculus
  misc_feature (42)..(42): n is a, c, g, or t
  misc_feature (138)..(138): n is a, c, g, or t
  misc_feature (221)..(282): n is a, c, g, or t
  misc_feature (381)..(381): n is a, c, g, or t
accaagcaggaggagtttgagagcatcgaggaggcgctgccngacacagacgtgctctacatgactcggatccagaaagaacgatttggctctgtccaggaatatgaagcttgctttggtcagttcatcctcactccncacatcatgacccgggccaagaagaagatggtggtgatgcacccaatgccccgtgtcaatgagataagtgtggaggtggactnnnnnnnnnnnnnnnnnnnnnnnnnnnnnnnnnnnnnnnnnnnnnnnnnnnnnnnnnnnnnncttgccaccgtgcttggccgtttctaggtcccagcttcctttcttgtctcttcaggcccagctgctgggcaaggaatcccgatgccccccccacggggncagcacacttagcagacaatcctggagcatacagatagcccaagcacatagatgtactaaactgggaccatgctttaggctccagacgagagtcttttctaacttggggatgcagtctcagatactgggggcccctc

SEQ ID NO: 172 - DNA, 518 bp, Mus musculus; identical to SEQ ID NO: 171
  misc_feature (42)..(42): n is a, c, g, or t
  misc_feature (138)..(138): n is a, c, g, or t
  misc_feature (221)..(282): n is a, c, g, or t
  misc_feature (381)..(381): n is a, c, g, or t

SEQ ID NO: 173 - DNA, 535 bp, Mus musculus
attgctgctctctgggcctcttgcacaccttcggccaggcctggtccgccccgtctggcacgctgggcaggccgcagagctgacaccctttccctggttcttggcccgcagtgcggggcggtgcgccgggggcgcgacgtgtctggggacatcttgtgatgttggcgagaacaggacatgatctcacatggcgagaagctctttagttccttaatcatttcacggtgccttcggacgctttttttccacctaaaacgtttagtttcagctcagtgatcagctaccccagctcggcgggggagcggaaggcttcaattattccgacttgtgagcgggccccagcaccaaaaaaaagaaagaaagaaagaaagaaagaaagaaagaaagaaagaaagaaagaaagaaagaaagaggaaaggaagaaagaaaaagagggagaaaagaaaataaaacaaagaaagaaaaaagaaaagaaaaaagaaagaaaaggaaaaaagacaccccaaaaaaagtggaaacttttcctcgctgtcca

SEQ ID NO: 174 - DNA, 535 bp, Mus musculus; identical to SEQ ID NO: 173

SEQ ID NO: 175 - DNA, 390 bp, Mus musculus
  misc_feature (201)..(203): n is a, c, g, or t
  misc_feature (213)..(213): n is a, c, g, or t
  misc_feature (230)..(230): n is a, c, g, or t
agctccaaggtatgctaatcataaaacagatagtgatattcctccacccaccctcttcctgggttcaaggagtgttcattcagagaaagtcaccctgacccaccctgagcattgctggaacttgctatgcaaatgtgctattgttaggggctcttagaaactgtctggagaaataacctgcacaattaccaggtattcctnnngactcttgtnactttgcacttccttgngactcttaacaggtatttttggtattttccaacaacgcccttcccacctccttgagttgtggtttcttcctttaaatacccctttatccagctactcggggcgccaaggtcctctacccctgtgtggtgtatgaccatgggcccgagagcgctcttgaat

SEQ ID NO: 176 - DNA, 390 bp, Mus musculus; identical to SEQ ID NO: 175
  misc_feature (201)..(203): n is a, c, g, or t
  misc_feature (213)..(213): n is a, c, g, or t
  misc_feature (230)..(230): n is a, c, g, or t

SEQ ID NO: 177 - DNA, 275 bp, Mus musculus
  misc_feature (173)..(173): n is a, c, g, or t
acggcaatgtattccaggatgctgtcttcaatcagacggtcacagttattgaaagagaggacgggttagatggagaaacaatttttatgtatatgttccttgctggtcttgggcttctggttgttgttggccttcatcagctcctggaatctagaaagcgcaagagacccatncagaaagtagaaatgggtacctcaagtcagaatgatgttgacatgagctggattcctcaggagactttgaatcagatcaataaagcttctcccagaaggcag

SEQ ID NO: 178 - DNA, 275 bp, Mus musculus; identical to SEQ ID NO: 177
  misc_feature (173)..(173): n is a, c, g, or t

SEQ ID NO: 179 - DNA, 585 bp, Mus musculus
  misc_feature (27)..(28): n is a, c, g, or t
  misc_feature (45)..(46): n is a, c, g, or t
  misc_feature (60)..(94): n is a, c, g, or t
  misc_feature (259)..(278): n is a, c, g, or t
  misc_feature (353)..(353): n is a, c, g, or t
  misc_feature (362)..(364): n is a, c, g, or t
  misc_feature (366)..(370): n is a, c, g, or t
  misc_feature (372)..(387): n is a, c, g, or t
  misc_feature (390)..(390): n is a, c, g, or t
  misc_feature (397)..(398): n is a, c, g, or t
  misc_feature (401)..(404): n is a, c, g, or t
  misc_feature (406)..(406): n is a, c, g, or t
  misc_feature (410)..(410): n is a, c, g, or t
  misc_feature (414)..(415): n is a, c, g, or t
  misc_feature (434)..(434): n is a, c, g, or t
  misc_feature (458)..(458): n is a, c, g, or t
  misc_feature (469)..(469): n is a, c, g, or t
  misc_feature (471)..(471): n is a, c, g, or t
  misc_feature (493)..(493): n is a, c, g, or t
  misc_feature (517)..(517): n is a, c, g, or t
  misc_feature (520)..(520): n is a, c, g, or t
  misc_feature (522)..(522): n is a, c, g, or t
  misc_feature (551)..(551): n is a, c, g, or t
gtgacctggaactggcccaacaacttnnacaagaagagtatcaannacagcaagcagttnnnnnnnnnnnnnnnnnnnnnnnnnnnnnnnnnnngagaggagccacatctggacgtccagctggagagcggcggcagaggtcaaagactgagtcagactgtgttctgctctgactctgccccctacagccagctcaggctgtgacttgcaggatcccaccccatctcaatccctgagacacagagaataacctatatgnnnnnnnnnnnnnnnnnnnngacaataggtgccaaggtcagacttggtaccatctttgcccttgtactgctatcttctcttcctctcttccaagnccacatagnnntnnnnngnnnnnnnnnnnnnnnnccncaccccnnttnnnngnatantccnntggatacatggacccaggntgcttgctggtcaagacacctatntggaaagcatntntcttgtgtccctgcctgtttgntcctgggctaccccacagaccctnccntntttgttttagggtttggtttgagtttctntctttattatttttaatgccttcctagaggtttg

SEQ ID NO: 180 - DNA, 585 bp, Mus musculus; identical to SEQ ID NO: 179
  misc_feature (27)..(28): n is a, c, g, or t
  misc_feature (45)..(46): n is a, c, g, or t
  misc_feature (60)..(94): n is a, c, g, or t
  misc_feature (259)..(278): n is a, c, g, or t
  misc_feature (353)..(353): n is a, c, g, or t
  misc_feature (362)..(364): n is a, c, g, or t
  misc_feature (366)..(370): n is a, c, g, or t
  misc_feature (372)..(387): n is a, c, g, or t
  misc_feature (390)..(390): n is a, c, g, or t
  misc_feature (397)..(398): n is a, c, g, or t
  misc_feature (401)..(404): n is a, c, g, or t
  misc_feature (406)..(406): n is a, c, g, or t
  misc_feature (410)..(410): n is a, c, g, or t
  misc_feature (414)..(415): n is a, c, g, or t
  misc_feature (434)..(434): n is a, c, g, or t
  misc_feature (458)..(458): n is a, c, g, or t
  misc_feature (469)..(469): n is a, c, g, or t
  misc_feature (471)..(471): n is a, c, g, or t
  misc_feature (493)..(493): n is a, c, g, or t
  misc_feature (517)..(517): n is a, c, g, or t
  misc_feature (520)..(520): n is a, c, g, or t
  misc_feature (522)..(522): n is a, c, g, or t
  misc_feature (551)..(551): n is a, c, g, or t

SEQ ID NO: 181 - DNA, 235 bp, Mus musculus
  misc_feature (123)..(123): n is a, c, g, or t
gcacaccttactcaggagcacacgtcttggcctctctggtgcctcatctaccctcgcgtgcctatagcactcgggagctcacgagctcttctccacgtgccttccagctttgactccagcagngggcatggcggtccctccgtttgccactcgtgagaagcacagataagattattataatacccacctttcctcaaacggcatagtatgatcgccctgctgtggcccagagcat

SEQ ID NO: 182 - DNA, 235 bp, Mus musculus; identical to SEQ ID NO: 181
  misc_feature (123)..(123): n is a, c, g, or t

SEQ ID NO: 183 - DNA, 491 bp, Mus musculus
  misc_feature (180)..(201): n is a, c, g, or t
  misc_feature (320)..(334): n is a, c, g, or t
  misc_feature (373)..(394): n is a, c, g, or t
ctcggtctagtcacctgacctgggctccacccacatcagaacctctagccctggtggcagagttttctgtgatacatattgtcactacccagtctggcatttctatagcctctcttaggaccccgccacacaataaaatagttgggaggctcgtctaggccccaggcttttcatctgccnnnnnnnnnnnnnnnnnnnnnngcggctttgataaaaccttaactgtaatcccgaagacagggagcccatagagggcgggatggtttccactaccccttccctgcacccagtccatgatttgagttctgcttgcttctttnnnnnnnnnnnnnnntttctagaagaggaagtctgtccaacaaggcccctgtgnnnnnnnnnnnnnnnnnnnnnnggtctgaggccccagcaaaaccgatcctgggccacaatagcaaggccaactctcaggacctcaggcagaccctcctctgctgggtttaatcttcttc

SEQ ID NO: 184 - DNA, 491 bp, Mus musculus; identical to SEQ ID NO: 183
  misc_feature (180)..(201): n is a, c, g, or t
  misc_feature (320)..(334): n is a, c, g, or t
  misc_feature (373)..(394): n is a, c, g, or t

SEQ ID NO: 185 - DNA, 417 bp, Mus musculus
  misc_feature (209)..(224): n is a, c, g, or t
  misc_feature (338)..(341): n is a, c, g, or t
  misc_feature (346)..(346): n is a, c, g, or t
  misc_feature (348)..(348): n is a, c, g, or t
  misc_feature (351)..(352): n is a, c, g, or t
  misc_feature (355)..(355): n is a, c, g, or t
  misc_feature (361)..(361): n is a, c, g, or t
ccaacagttatcgtgactcaacctggattcgttcgtgctccccaaaattccaactggcagaccagcctgtgtgattgcttcagtgactgcggagtctgcctctgtgggaccttttgtttcacttgtcttggatgtcaagtggcagctgacatgaatgagtgttgtctgtgtggaacaacggtggccatgaggactctctaccgaacccnnnnnnnnnnnnnnnnatctatttgtgatgactacatggtcacactcttctgtcctgtttgctctgtgtgccaactcaagagagacattaacaggaggagagccatgaacgctttctaaggagctggatnnnnagagntntgnntgnagaagntcaactcagcacacactccttcagcctgagatttttcaaatctttggcaactgaga

SEQ ID NO: 186 - DNA, 417 bp, Mus musculus; identical to SEQ ID NO: 185
  misc_feature (209)..(224): n is a, c, g, or t
  misc_feature (338)..(341): n is a, c, g, or t
  misc_feature (346)..(346): n is a, c, g, or t
  misc_feature (348)..(348): n is a, c, g, or t
  misc_feature (351)..(352): n is a, c, g, or t
  misc_feature (355)..(355): n is a, c, g, or t
  misc_feature (361)..(361): n is a, c, g, or t

SEQ ID NO: 187 - DNA, 462 bp, Mus musculus
  misc_feature (59)..(120): n is a, c, g, or t
  misc_feature (183)..(183): n is a, c, g, or t
  misc_feature (211)..(211): n is a, c, g, or t
  misc_feature (218)..(219): n is a, c, g, or t
  misc_feature (223)..(223): n is a, c, g, or t
  misc_feature (237)..(237): n is a, c, g, or t
  misc_feature (270)..(270): n is a, c, g, or t
  misc_feature (283)..(283): n is a, c, g, or t
  misc_feature (300)..(300): n is a, c, g, or t
  misc_feature (331)..(331): n is a, c, g, or t
  misc_feature (367)..(367): n is a, c, g, or t
  misc_feature (389)..(415): n is a, c, g, or t
agcaacagtggttggatgaacagcagcaaatactggacactcttaacgtattaaacagnnnnnnnnnnnnnnnnnnnnnnnnnnnnnnnnnnnnnnnnnnnnnnnnnnnnnnnnnnnnnnagatccgtgggataaaggaattcaaggagaagctcttgcttaccttgggtgcttttttagacnatcattttcctctgcctgaagcaagtanctccaannaaanggaaaaacattcangactcgaatgcacagctgataacactgaatganatattagagatgnttataaatagaatgttngatgttccacatgatccatatgttaaaattngtgattccttttggccaccatatattgagctacttntgcgttacggaattgctttgannnnnnnnnnnnnnnnnnnnnnnnnnnggttagaagctttccatcagtaaaatgatgacctgttttcacacagt

SEQ ID NO: 188 - DNA, 462 bp, Mus musculus; identical to SEQ ID NO: 187
  misc_feature (59)..(120): n is a, c, g, or t
  misc_feature (183)..(183): n is a, c, g, or t
  misc_feature (211)..(211): n is a, c, g, or t
  misc_feature (218)..(219): n is a, c, g, or t
  misc_feature (223)..(223): n is a, c, g, or t
  misc_feature (237)..(237): n is a, c, g, or t
  misc_feature (270)..(270): n is a, c, g, or t
  misc_feature (283)..(283): n is a, c, g, or t
  misc_feature (300)..(300): n is a, c, g, or t
  misc_feature (331)..(331): n is a, c, g, or t
  misc_feature (367)..(367): n is a, c, g, or t
  misc_feature (389)..(415): n is a, c, g, or t

SEQ ID NO: 189 - DNA, 572 bp, Mus musculus
  misc_feature (186)..(200): n is a, c, g, or t
  misc_feature (468)..(468): n is a, c, g, or t
gaactgtacttttatcactagaggaatgattgggggtgggggggggcgtgtttctgttttgttatgccaaatgagaaagctgtcagggagactctcatttaaatctaatctgacggtcctcctggtctttgtacgctaccactgcctagcaatgcagccagccacagtgcagctacctcaacttcnnnnnnnnnnnnnnnaaatgaaatttaatttaataaggagcaagtaactgtcaatgatggtactatcatcctagatgaaattacaaagttgcccttttataattagcaagatttggcgatactatgaattttgaagtcattttgaagcagtacagcttttccactgatgattttatactccccactcatgttaagaatgttgttctagttttcgttaaacgtagaaacaataatgtcaaatgataatgtcttagaacttgaatccatgagcagagtcaaaggntggaacccttgttttggacctgatttatggaagtgaagagttggaccaccatagcatgcattatagctactggttttgtgacagttgtccacaacacgtatttg

SEQ ID NO: 190 - DNA, 572 bp, Mus musculus; identical to SEQ ID NO: 189
  misc_feature (186)..(200): n is a, c, g, or t
  misc_feature (468)..(468): n is a, c, g, or t

SEQ ID NO: 191 - DNA, 606 bp, Mus musculus
  misc_feature (255)..(256): n is a, c, g, or t
  misc_feature (335)..(335): n is a, c, g, or t
  misc_feature (446)..(446): n is a, c, g, or t
  misc_feature (448)..(448): n is a, c, g, or t
  misc_feature (581)..(581): n is a, c, g, or t
gatcctaatggatctgcgttctaagggtactgatggtggaagggctgagaaggtactagaagcctgttctatcgcctgcaacaagaatacctgcccaggtgacaagagcgcgttacggcccagtggactgcgactggggactccagcattgacatcccgaggacttttggaagaagacttccaaaaagtagcacactttatccacagggggatagagttgacactgcagattcagagccacatggccacgaaggnncacactgaaagagttcaaagagaagctggcaggagatgagaagatccagagtgctgtggcaactctccgggaagaagtngagaactttgcttccaacttctcactacctggccttcctgacttctgacaggaacagcctgtgtttgccaagagggtaggattgttccgggaccctgtgaaccctgtgccntnttgaggctgagaagtggaccactgagctgtaccatgctttctttggtgggtgtttctgtttacctgttttcaaatattttgggaacaggttattaaggacttgaaatttgaaacgttatgtagccattagatntcctcgctcatgcatgtgaggcaaa

SEQ ID NO: 192 - DNA, 606 bp, Mus musculus; identical to SEQ ID NO: 191
  misc_feature (255)..(256): n is a, c, g, or t
  misc_feature (335)..(335): n is a, c, g, or t
  misc_feature (446)..(446): n is a, c, g, or t
  misc_feature (448)..(448): n is a, c, g, or t
  misc_feature (581)..(581): n is a, c, g, or t

SEQ ID NO: 193 - DNA, 363 bp, Mus musculus
  misc_feature (128)..(147): n is a, c, g, or t
  misc_feature (292)..(292): n is a, c, g, or t
  misc_feature (319)..(319): n is a, c, g, or t
gaatgctcacggtcctccatttcaacccacgactgcgatgctgggacatgctgcaaggttggcctccctgggtgtgttcttcaaaggagcatgcggagttggaccagacacctttctgccttttttcnnnnnnnnnnnnnnnnnnnnttggtccagtgtcccctctagggaatgcctccattgagggcagaatgtctgtcaaccccacaagtgctcagcccactgtgaaaccactgggttctgggtcccagtggctgaatcaggagtcttttgtcactgtgctgcaccccgntcccctttcctgatacaaaaccgagcncaccggcttcttgaagccccacatgtacctcgaggcctttctgc

SEQ ID NO: 194 - DNA, 363 bp, Mus musculus; identical to SEQ ID NO: 193
  misc_feature (128)..(147): n is a, c, g, or t
  misc_feature (292)..(292): n is a, c, g, or t
  misc_feature (319)..(319): n is a, c, g, or t

SEQ ID NO: 195 - DNA, 580 bp, Mus musculus
  misc_feature (199)..(199): n is a, c, g, or t
  misc_feature (248)..(248): n is a, c, g, or t
  misc_feature (337)..(337): n is a, c, g, or t
  misc_feature (471)..(471): n is a, c, g, or t
tgctgcttcgtggtctgcgaagaatgccgcatcaccgagtgggtcagcgtctgcaagtgagcagacccaagctcctctgggtctcaagaatggttgtcctcttggtgcctggcttctgccgctagcggatctgagccaggcagcaagcagcagccttggctcctgagagaggtggttggctcttacagccccgagggtntacaatcaccagacagtccagatctgattgacattcctccgctcacctntgtaggttcccctctttctgttcctagctcagacagctgggggtgatagtggagactgttccacaccctaggacaggtcaccaaagcancccagcctggcatgcctacctcctgtcatctcttcttcccttccccaggagtgataggcaatgcactgaagctgatgggcaccggggaagaaaactaaaaggcagaaatggccgtcatcgggctgaagtgactntaagggctccagacctctgctcctgtctttcacttaacagatatttatttttgcgctctctttgagacactctctggggaaaaagaagctccggagtctacaggctgat

SEQ ID NO: 196 - DNA, 580 bp, Mus musculus; identical to SEQ ID NO: 195
  misc_feature (199)..(199): n is a, c, g, or t
  misc_feature (248)..(248): n is a, c, g, or t
  misc_feature (337)..(337): n is a, c, g, or t
  misc_feature (471)..(471): n is a, c, g, or t

SEQ ID NO: 197 - DNA, 370 bp, Mus musculus
  misc_feature (183)..(199): n is a, c, g, or t
  misc_feature (202)..(202): n is a, c, g, or t
  misc_feature (205)..(211): n is a, c, g, or t
  misc_feature (245)..(245): n is a, c, g, or t
  misc_feature (247)..(247): n is a, c, g, or t
  misc_feature (257)..(257): n is a, c, g, or t
  misc_feature (261)..(261): n is a, c, g, or t
gggatgatctacacccagtcctggggagggttactgctgagatgggcctcattcaatgtgagtttccaagttggaatggcctgtggtgagtttcagccaaggggaggaaggactgcctaggaatggatgtatgttgtggaaatgacaagcaagcgcggaaaacctggcatcctgcctcttccnnnnnnnnnnnnnnnnnttncannnnnnngcagctgtaagtccatccggatgaggatgtgacntntggagctgcngcanctattctgcaaccacgtgacaacgaattccaaaatgaagagccatgctctaggaacagtgaagcagaggataccccaggccttcaggaacgtcccacctgcaggcctgt

SEQ ID NO: 198 - DNA, 370 bp, Mus musculus; identical to SEQ ID NO: 197
  misc_feature (183)..(199): n is a, c, g, or t
  misc_feature (202)..(202): n is a, c, g, or t
  misc_feature (205)..(211): n is a, c, g, or t
  misc_feature (245)..(245): n is a, c, g, or t
  misc_feature (247)..(247): n is a, c, g, or t
  misc_feature (257)..(257): n is a, c, g, or t
  misc_feature (261)..(261): n is a, c, g, or t

SEQ ID NO: 199 - DNA, 224 bp, Mus musculus
  misc_feature (124)..(143): n is a, c, g, or t
tgtgagctgcttctgctctctgccccacccaagctctgcgtagtctcctgggttctcaaaatcgacctttctaggaaacagtggccttgactgtgtgtgctcccacacactcactctcccagcnnnnnnnnnnnnnnnnnnnnggtgtctaaacacactacagtatgttcttacgaaatatgcttttattaagttgggcacaggggcacacacctttactacca

SEQ ID NO: 200 - DNA, 224 bp, Mus musculus; identical to SEQ ID NO: 199
  misc_feature (124)..(143): n is a, c, g, or t

SEQ ID NO: 201 - DNA, 425 bp, Mus musculus
  misc_feature (270)..(294): n is a, c, g, or t
  misc_feature (296)..(297): n is a, c, g, or t
  misc_feature (299)..(304): n is a, c, g, or t
  misc_feature (338)..(338): n is a, c, g, or t
  misc_feature (354)..(355): n is a, c, g, or t
  misc_feature (357)..(357): n is a, c, g, or t
  misc_feature (361)..(363): n is a, c, g, or t
  misc_feature (369)..(381): n is a, c, g, or t
  misc_feature (383)..(395): n is a, c, g, or t
  misc_feature (397)..(398): n is a, c, g, or t
cggcctggcagatttgacaagctggtgtttgtaggggcgagtgaggaccgggcctcccagctgcgtgtgctgagcgccatcacacggaagttcaagctggaggcctctgtgagcctggcaaacgtgctggattgctgcccaccccagctgactggtgcagatctctattctctctgctctgacgccatgatgactgccctcaaacgcagggttcgagacctagaggaagggctagagctgcggagctcagcactgctgctcaccatggannnnnnnnnnnnnnnnnnnnnnnnncnncnnnnnncagtcagtgagcaggagctgttgcgatacaagcncatccaacgcaagttnncngccnnntaggannnnnnnnnnnnncnnnnnnnnnnnnntnngcctatgccccctgactgaaggtacct

SEQ ID NO: 202 - DNA, 425 bp, Mus musculus; identical to SEQ ID NO: 201
  misc_feature (270)..(294): n is a, c, g, or t
  misc_feature (296)..(297): n is a, c, g, or t
  misc_feature (299)..(304): n is a, c, g, or t
  misc_feature (338)..(338): n is a, c, g, or t
  misc_feature (354)..(355): n is a, c, g, or t
  misc_feature (357)..(357): n is a, c, g, or t
  misc_feature (361)..(363): n is a, c, g, or t
  misc_feature (369)..(381): n is a, c, g, or t
  misc_feature (383)..(395): n is a, c, g, or t
  misc_feature (397)..(398): n is a, c, g, or t

SEQ ID NO: 203 - DNA, 410 bp, Mus musculus
  misc_feature (94)..(115): n is a, c, g, or t
  misc_feature (161)..(176): n is a, c, g, or t
  misc_feature (259)..(259): n is a, c, g, or t
  misc_feature (304)..(322): n is a, c, g, or t
  misc_feature (371)..(371): n is a, c, g, or t
tgagccacatgatgatcaagtttttctggatggaaatgaggtttttgtgtggatctatgacccagttcacattaaaacatttgtcatgggattnnnnnnnnnnnnnnnnnnnnnngcagccaccctcttccctctctggccagcagaaatgagagtaggtnnnnnnnnnnnnnnnntgggcgcaggctgttttgtagccagcattcttctccttgctattgctcgctgcatcctgtttctcatcatctggctgataacnggaggaaggcaccacttttggttcctgccaaacctgactgctgannnnnnnnnnnnnnnnnnnttcaggcccctgtacacacatgagtacaaaggaccaaaagcagacttanagaaggatgagaaatctgaaaccaaaaagcagcagaagt

SEQ ID NO: 204 - DNA, 410 bp, Mus musculus; identical to SEQ ID NO: 203
  misc_feature (94)..(115): n is a, c, g, or t
  misc_feature (161)..(176): n is a, c, g, or t
  misc_feature (259)..(259): n is a, c, g, or t
  misc_feature (304)..(322): n is a, c, g, or t
  misc_feature (371)..(371): n is a, c, g, or t

SEQ ID NO: 205 - DNA, 85 bp, Mus musculus
cgatcttcggcaagatcatccgcaaagaaatccccgccaagatcatcttcgaggacgaccggtgtcttgcttttcatgacatttc

SEQ ID NO: 206 - DNA, 85 bp, Mus musculus; identical to SEQ ID NO: 205

SEQ ID NO: 207 - DNA, 448 bp, Mus musculus
  misc_feature (42)..(42): n is a, c, g, or t
  misc_feature (47)..(47): n is a, c, g, or t
  misc_feature (55)..(55): n is a, c, g, or t
  misc_feature (58)..(58): n is a, c, g, or t
  misc_feature (102)..(102): n is a, c, g, or t
  misc_feature (126)..(181): n is a, c, g, or t
catgtgcagctttctgttcaacttgaacaatgattttgtggntggangcaacccnaangggcaacaaaattcgttttgctaatcattcagtaaatccaaacngctatgcaaaagttatgatggttnnnnnnnnnnnnnnnnnnnnnnnnnnnnnnnnnnnnnnnnnnnnnnnnnnnnnnnngttgttttttgattacagatacagccaggctgatgccctgaagtatgtgggcatcgaacgagaaatggaaatcccttgacatctactacctcttccccttctctctgaaacagctgccttagcttcaggaaccttgagtactgtgggcaatttagaaaacggaaatgcagtttgaaattctgaatttgcaaagtactgtaacagtaatttatagtaatgttttaaaatcaactttttattgccttctcaccagctgcaaagtgtttt

SEQ ID NO: 208 - DNA, 448 bp, Mus musculus; identical to SEQ ID NO: 207
  misc_feature (42)..(42): n is a, c, g, or t
  misc_feature (47)..(47): n is a, c, g, or t
  misc_feature (55)..(55): n is a, c, g, or t
  misc_feature (58)..(58): n is a, c, g, or t
  misc_feature (102)..(102): n is a, c, g, or t
  misc_feature (126)..(181): n is a, c, g, or t

SEQ ID NO: 209 - DNA, 310 bp, Mus musculus
  misc_feature (69)..(69): n is a, c, g, or t
  misc_feature (83)..(83): n is a, c, g, or t
gtatagttttacactctagtgccatatattttttaaagaaattttctttccttacaaaagaagaagaanaaaaaaaaaaaaangaataaaaacgtgtcgtgtttacttcgtgatgaggaagcagaagccacccttcggtgctacctgtcttgtcaccagactgcagcttgcctgtcggagcatctgtggcgccggtgggatgcttggatgctcagcaagcaagcgtctcttcagggatgaggtcgtgtgtggagcaggttggggaggatgcaggcccctgtccacgtctgtaagtctccagggatgatca

SEQ ID NO: 210 - DNA, 310 bp, Mus musculus; identical to SEQ ID NO: 209
  misc_feature (69)..(69): n is a, c, g, or t
  misc_feature (83)..(83): n is a, c, g, or t

SEQ ID NO: 211 - DNA, 354 bp, Mus musculus
ccccatggtaacaaagatggtgtttcaccgagtcaccacctttcacagacttggagattctgcactaccatgtgcctggcacatttagacaataagagatgaccaagtctgctattgagtagacaactgtttccctcgaaacagactggcacttgctggactccacctctgctcctcagagtctcagccctgaagccacattctgcctatttgtccccagacagacgactagagacaggtggtgcatccacccagagtgcaaagagggcaatttatttctggcttttgtgtgtttttacagattgcagccattaagtagttgattactgtgttgatttcaatactcaagaaagc

SEQ ID NO: 212 - DNA, 354 bp, Mus musculus; identical to SEQ ID NO: 211

SEQ ID NO: 213 - DNA, 563 bp, Mus musculus
  misc_feature (348)..(443): n is a, c, g, or t
gtgtttctcacagcaacataaagcaaactagaatgggcatcagtggatctgcatttggaaaacacatgaccatacattgaacctatcagttatttatatctgaaatctgaaacgttgttcactccgtaaccattcttatattgtcttgcttcaccttctttactgtggaaagtccctttccacattttatcaaaaaatagatatgctaaaatgaaaaacatatttatttcaactaaatccaaagagcttccttgtaaaaatatttagtatcaaatgcaatgttaattgtcacaaaataaataggcaaaggtatcaacaagtaggagtacaggattttataatgccacnnnnnnnnnnnnnnnnnnnnnnnnnnnnnnnnnnnnnnnnnnnnnnnnnnnnnnnnnnnnnnnnnnnnnnnnnnnnnnnnnnnnnnnnnnnnnnnnggtgtgtcactgggtcaggctttgaagttgtaaaagctcacgctattcccagttgcctgtggttgtgtcttacgtgagcttgttgctacagttccagcatcatgcctactccactgctga

SEQ ID NO: 214 - DNA, 563 bp, Mus musculus; identical to SEQ ID NO: 213
  misc_feature (348)..(443): n is a, c, g, or t

SEQ ID NO: 215 - DNA, 585 bp, Mus musculus
  misc_feature (30)..(30): n is a, c, g, or t
  misc_feature (213)..(213): n is a, c, g, or t
  misc_feature (241)..(241): n is a, c, g, or t
  misc_feature (261)..(261): n is a, c, g, or t
  misc_feature (269)..(269): n is a, c, g, or t
  misc_feature (272)..(272): n is a, c, g, or t
  misc_feature (275)..(275): n is a, c, g, or t
  misc_feature (279)..(279): n is a, c, g, or t
  misc_feature (287)..(287): n is a, c, g, or t
  misc_feature (297)..(297): n is a, c, g, or t
  misc_feature (303)..(303): n is a, c, g, or t
  misc_feature (306)..(306): n is a, c, g, or t
  misc_feature (316)..(316): n is a, c, g, or t
  misc_feature (318)..(319): n is a, c, g, or t
  misc_feature (331)..(331): n is a, c, g, or t
gaagagtgctacagccaacaccatcctcgngagacgtcaatttgattctaagatttgtgccaatgctgttaccaagacctgccagagagcatacagggagtggaaggggaaaaaccttgttgtagtcgacactcctgggctctttgacaccaaggagaccatgaaaaccacatgtttcgagatcagccgctgcgttctctactcctgccctgngcctcacgccattattctggttttgcgnactggaccgttacactgaanaagagcanaanacngtcngctctgancaagggtctntttggngangcagccctgnannacatgatcatcntgtttactcacaaagaagaccttgaggatcagagccttgataattttcagtctacatagcaacttccagcaacatgaaaagggaggaagcttccagcccagttcccgcctgatttcttcatatagtacagtgtgtagagtgtttagcaatagggtgggtatagcaagttctggtgggttctttataatttgacatgatttattaatgtagtatattgtattttctgaagatggttacggtgacatgttacattc

SEQ ID NO: 216 - DNA, 585 bp, Mus musculus; identical to SEQ ID NO: 215
  misc_feature (30)..(30): n is a, c, g, or t
  misc_feature (213)..(213): n is a, c, g, or t
  misc_feature (241)..(241): n is a, c, g, or t
  misc_feature (261)..(261): n is a, c, g, or t
  misc_feature (269)..(269): n is a, c, g, or t
  misc_feature (272)..(272): n is a, c, g, or t
  misc_feature (275)..(275): n is a, c, g, or t
  misc_feature (279)..(279): n is a, c, g, or t
  misc_feature (287)..(287): n is a, c, g, or t
  misc_feature (297)..(297): n is a, c, g, or t
  misc_feature (303)..(303): n is a, c, g, or t
  misc_feature (306)..(306): n is a, c, g, or t
  misc_feature (316)..(316): n is a, c, g, or t
  misc_feature (318)..(319): n is a, c, g, or t
  misc_feature (331)..(331): n is a, c, g, or t

SEQ ID NO: 217 - DNA, 217 bp, Mus musculus
gttgcctgagtatgctaagcagttgctctcccctgcagctgcccccagcccacttgactgtgcagactcagggcttgcaattactcgattctccgcggctgagcttcccatcgtcctctctccctaaggtcctgagtagttgaatacagacttgtggtgccatccttgcttcaaaagccatatttatatgagttctctttgctatgcagcatgaaag

SEQ ID NO: 218 - DNA, 217 bp, Mus musculus; identical to SEQ ID NO: 217

SEQ ID NO: 219 - DNA, 468 bp, Mus musculus
  misc_feature (116)..(117): n is a, c, g, or t
  misc_feature (120)..(120): n is a, c, g, or t
  misc_feature (122)..(128): n is a, c, g, or t
  misc_feature (130)..(131): n is a, c, g, or t
  misc_feature (134)..(135): n is a, c, g, or t
  misc_feature (202)..(202): n is a, c, g, or t
  misc_feature (248)..(250): n is a, c, g, or t
  misc_feature (252)..(252): n is a, c, g, or t
  misc_feature (254)..(255): n is a, c, g, or t
  misc_feature (257)..(277): n is a, c, g, or t
  misc_feature (279)..(279): n is a, c, g, or t
  misc_feature (282)..(286): n is a, c, g, or t
  misc_feature (288)..(289): n is a, c, g, or t
tcactgcaggatatacatgtaaatatctacatgtaatatttacaaaacagtaaaaatgctgacaggcaggcaggctgaaagatggagaaaagggagctgtgaatgataggttgttnncancnnnnnnncnnacnnaggaaagctgaaaccttggggacaagctaaagagaacaattctctgaacgaacgtgtaagcagagtnaccttccacaggaaaacttacaaacaacctcatctccaaaccaggnnngnannannnnnnnnnnnnnnnnnnnnncnaannnnnannaaagaaaagcttttggaagctcgaagaaacctgggtgtgactaaagcccagtgaccctgtctgttcctttactctaacttgttttccttttgtatgttttttactctttctctacttcagtcaaaagctcttttctatcataacttttggtcataatttgtgtagtgtctcttctgtgc

SEQ ID NO: 220 - DNA, 468 bp, Mus musculus; identical to SEQ ID NO: 219
  misc_feature (116)..(117): n is a, c, g, or t
  misc_feature (120)..(120): n is a, c, g, or t
  misc_feature (122)..(128): n is a, c, g, or t
  misc_feature (130)..(131): n is a, c, g, or t
  misc_feature (134)..(135): n is a, c, g, or t
  misc_feature (202)..(202): n is a, c, g, or t
  misc_feature (248)..(250): n is a, c, g, or t
  misc_feature (252)..(252): n is a, c, g, or t
  misc_feature (254)..(255): n is a, c, g, or t
  misc_feature (257)..(277): n is a, c, g, or t
  misc_feature (279)..(279): n is a, c, g, or t
  misc_feature (282)..(286): n is a, c, g, or t
  misc_feature (288)..(289): n is a, c, g, or t

SEQ ID NO: 221 - DNA, 290 bp, Mus musculus
ggccacttcagtacactcagacttcagtacccatctctgtggcatgccctcctccagtcctgggtcacccttccctctcccaccccagggccagccaggttccaggaacactgccattgctcatatatggcccgctcccaggccccctgggaccagacagttgtaggaaggaactttcctgcgtgggacttgccagtgtcccctgtcctggttggcccctgtctgtggcagcagaatccagagcaacaagagaccagtggttccgaggatctgcctgtcggaggaaagca

SEQ ID NO: 222 - DNA, 290 bp, Mus musculus; identical to SEQ ID NO: 221

SEQ ID NO: 223 - DNA, 423 bp, Mus musculus
  misc_feature (26)..(26): n is a, c, g, or t
  misc_feature (39)..(39): n is a, c, g, or t
  misc_feature (298)..(298): n is a, c, g, or t
  misc_feature (398)..(398): n is a, c, g, or t
tcgtcctggggaagagtctagattgnatgtcacagtgantgaatgacacagtgacaggacattctacaaaggaccacaggtgtgtgccacgacagcttctcccaactgctaggactgcaggtgtgtgccacgacagcttctcccaactgctaggaccacaggtgtgtgccacgacagcttctcccaactactaggactacagttgcaggattcttcatctccttccatgatgctgagttctgctggttggaggccaggagtgccaacaacaactattgggtttcctcctactactganagtgaagggcacagaaagacaatgacaagtcgccgggatgacagattcagattactaaagggaaatcaggttgctagtacatagtagtgcttagaaagtntatgctgaaactcaaagacaacttg

SEQ ID NO: 224 - DNA, 423 bp, Mus musculus; identical to SEQ ID NO: 223
  misc_feature (26)..(26): n is a, c, g, or t
  misc_feature (39)..(39): n is a, c, g, or t
  misc_feature (298)..(298): n is a, c, g, or t
  misc_feature (398)..(398): n is a, c, g, or t

SEQ ID NO: 225 - DNA, 375 bp, Mus musculus
  misc_feature (110)..(110): n is a, c, g, or t
  misc_feature (113)..(113): n is a, c, g, or t
  misc_feature (293)..(293): n is a, c, g, or t
cttcgcaaggggacgataaacatcacagtcgagggcggaagaatcagccgctttcttcatctttccatgacatcttaaatccccacaaagaccatggcttgagagcaganccnagagacaaagaggaaaataggcaaacccttccctattcgtacagcattaatcacccctgctttgccgaaatagaagacaccctttccagccagatcaacgagagtctgcgttgggatgggattctcaccgaccctgaggcagaaaaggaaaggatccgcatctacaagctcaaccgaagnaagcggtaccgcctcatggccctcaagtgcttccattccgacccctgcgtggaggagagcgtggagaatctgccctacctct

SEQ ID NO: 226 - DNA, 375 bp, Mus musculus; identical to SEQ ID NO: 225
  misc_feature (110)..(110): n is a, c, g, or t
  misc_feature (113)..(113): n is a, c, g, or t
  misc_feature (293)..(293): n is a, c, g, or t

SEQ ID NO: 227 - DNA, 500 bp, Mus musculus
  misc_feature (131)..(131): n is a, c, g, or t
  misc_feature (138)..(138): n is a, c, g, or t
  misc_feature (150)..(150): n is a, c, g, or t
  misc_feature (162)..(162): n is a, c, g, or t
  misc_feature (181)..(181): n is a, c, g, or t
  misc_feature (196)..(197): n is a, c, g, or t
  misc_feature (199)..(200): n is a, c, g, or t
  misc_feature (264)..(264): n is a, c, g, or t
  misc_feature (367)..(367): n is a, c, g, or t
  misc_feature (432)..(432): n is a, c, g, or t
cagggcacttctcatgaccggggtggctggccttcaggacttaaccatgcaagccatttatcacactgacacaggtgcggtaccaggcgtgtgcagctccatttgtagcataccggatgctcttgactctngacactngatgtggtaggnccgagagaggcnatcctcagtccaggactcngagggagcaaatctnnanntcggaacttgtctatgtcgctggcattagtaaggtccgcctcggggacaaaagcctggtggtgntgaggtcccctaggagctagcgtttggctgctgggcaccatgccagtaagagcccggcgtcctgcggggcctaggagagcatgacaggcaggtgtggggaccnaggaacagctagaggatgctccagctgagcatctccgggctgtgtgcgatctgagcatcccttgngcgcgcgcggggccggggtcagggggcgcgcgggagagggaggagccgcacagggtcggcgttcacag

SEQ ID NO: 228 - DNA, 500 bp, Mus musculus; identical to SEQ ID NO: 227
  misc_feature (131)..(131): n is a, c, g, or t
  misc_feature (138)..(138): n is a, c, g, or t
  misc_feature (150)..(150): n is a, c, g, or t
  misc_feature (162)..(162): n is a, c, g, or t
  misc_feature (181)..(181): n is a, c, g, or t
  misc_feature (196)..(197): n is a, c, g, or t
  misc_feature (199)..(200): n is a, c, g, or t
  misc_feature (264)..(264): n is a, c, g, or t
  misc_feature (367)..(367): n is a, c, g, or t
  misc_feature (432)..(432): n is a, c, g, or t

SEQ ID NO: 229 - DNA, 368 bp, Mus musculus
  misc_feature (81)..(81): n is a, c, g, or t
  misc_feature (225)..(225): n is a, c, g, or t
gagacaacaaatctctgcaaacaagttcctcgctctttctcccccgttagtgagacctaacggatcacaatggctggaggngaaaggtggcactctcgtcaggtaatgacatctctccaacagcccatattaaagcagccgtgcttgtttagactagcctatttgcacctacctgcagagggcctttttaatgtaattattagcctcagatgccctgcttagganttgaaagtatcgttcattttcatcttgcttcagctaccgctgctatccccccatccctgctcagccacctcatcttcccacagccgagggtagagaggagcagcagccagaagagctgaattaacaagaacaagctggcaggt

SEQ ID NO: 230 - DNA, 368 bp, Mus musculus; identical to SEQ ID NO: 229
  misc_feature (81)..(81): n is a, c, g, or t
  misc_feature (225)..(225): n is a, c, g, or t

SEQ ID NO: 231 - DNA, 337 bp, Mus musculus
aggaagcaacctgaagaaagtcttccgctctttcattctgttcagacccctcttcatgaattcatcaccaccatccagtcctggcacaaggacactgcagtgcaccatgctgtgctttctacgttgattgctgcacctgtggttgagataagtcaccagctgcagaaggtttctgatatagaagagctgacctcaccacaatgccttcatgaccttcctccattttcaaggtgtttagtgggagtgatcatgaagtcttcggatgtggtcaggtcatttttggatgaactgaaggcatgtgtaacttctggtgatgttgaaggcattgtgtgcctca

SEQ ID NO: 232 - DNA, 337 bp, Mus musculus; identical to SEQ ID NO: 231

SEQ ID NO: 233 - DNA, 473 bp, Mus musculus
  misc_feature (28)..(29): n is a, c, g, or t
  misc_feature (34)..(34): n is a, c, g, or t
tgcagagattccaccgaggcgagatggnnacgcntgcctcaagcaccctgcctgagaactgaggaccgttgctctagggaatgcgggtgggaaagtacgttctggggcgtggaatgctcaccagcgcgtgaaaccagctccctctaagccccaggcttctgctagccgcccatcccaccccaccgcatgtcctcccagggaaatttaagttacttccaacttactaagggcttgttgcatgaaagttacagggccaggctggaggagtaaccagacgacaagtccccagaggctgagagagagagaaatgggttctgtgtaaacatctaagctaggatcagggggtggcaagagtccctacccctatcacccttcgaggatcttctggtgttgagttcttctaattttctcagaggtgagacatcctaatttcatgatataatagctgagagaggttacttcccaatggagat

SEQ ID NO: 234 - DNA, 473 bp, Mus musculus; identical to SEQ ID NO: 233
  misc_feature (28)..(29): n is a, c, g, or t
  misc_feature (34)..(34): n is a, c, g, or t

SEQ ID NO: 235 - DNA, 394 bp, Mus musculus
tcccgattgttctgcgcggcctgtcccgccaagccctcggccttctcacaggcagagagcaccaaaggacacctttttgcggttcgacgacccggtgtgacggtggatgtgagaatccaggaagaagatccggttgcattgctgggatgccgcgcctgtccggccaccacctccgcatggaggctgcgggttcctggggaccccacctagttcggtgcttctctctccctttactctcttggcgcagcagggacgcccagctggaaatcaaagccgggcgggagggattctgaagacgctaggggacatcagggaccagaatgaggctaggcctggattcatcgcccgggacgcgggagccacggggagctgggcgcaggcactgctctaatcg

SEQ ID NO: 236 - DNA, 394 bp, Mus musculus; identical to SEQ ID NO: 235

SEQ ID NO: 237 - DNA, 430 bp, Mus musculus
cctccaatctaggaagatggtgtggggctggaagcggaggcagggaggaaagaaaacgggagaaacggtcatggagaagcccatcctcagagggatttggctcttgctctgaggggagcctcacagattccagacggccgtggcaagtccaagcatcgcgtctctaccatgtcccagagccagaagagaggctgttgtttggaaaggcaagaagaattccccaaacttggccagaattgtattgtagacaagatggaggaggaacagtttacaggaaggcctccaacgcgcctgcacacagatgcacttcctgtgaaagcactggtgcagatgctctgagtgtaagcagccagtgtcttggaggcatcagcaaccctccttcatgaccttattaataaagtccaagattcccttcgcaattaagaaggga

SEQ ID NO: 238 - DNA, 430 bp, Mus musculus; identical to SEQ ID NO: 237

SEQ ID NO: 239 - DNA, 431 bp, Mus musculus
  misc_feature (29)..(29): n is a, c, g, or t
  misc_feature (82)..(82): n is a, c, g, or t
  misc_feature (206)..(206): n is a, c, g, or t
cgaatggagccatggctccctaggggagntaagttgaaggtgatgcatcctggggccttaagatggacagaaaggggctgcntacctcagcgggcaggaggtgctagaactagacaggaatcaccagccactatcagcagcttcctggagctgaaagggcctgtctctctacagcaggagactgtgctgcggatggagagggctgnccaagcccctgacgcctcagggtgcccgagccccatgagccctggtgcaatgaaccccttctttccgagctgcagcccccgatcccctgcagaagcctgtgccctctgtagcctgctgtgcagccaggcgtcctgtctgactttgcacagcctgttgggaaggttgggaagaggcaaaatggagggagaccttttgttttattctgttcccaataaaaggacttg

SEQ ID NO: 240 - DNA, 431 bp, Mus musculus; identical to SEQ ID NO: 239
  misc_feature (29)..(29): n is a, c, g, or t
  misc_feature (82)..(82): n is a, c, g, or t
  misc_feature (206)..(206): n is a, c, g, or t

SEQ ID NO: 241 - DNA, 463 bp, Mus musculus
  misc_feature (29)..(29): n is a, c, g, or t
  misc_feature (32)..(32): n is a, c, g, or t
  misc_feature (68)..(68): n is a, c, g, or t
agcctggcacagcacggctttatcccgtntgncactcagcgcaaatgccagtacttcacgtgcttggnttcctgcccccagcagccctaacaacaccagaaagcgttcctggtacctcctaaaggagtggcctctagggagatcttccttcccctttggccatcatggaggtctgcggaccaccctgtccatccctgtctgtctgctttggttttccctccccactgctccctctcactttttaactggcctcagagcaaagctcaacgttctctctggctggtgatcaaaggggccccgtgtgcctgcctggctcttcacttcagagatgggggcatgtttgtgttgggcggccgatgactctctgtaaggaaaggaaggcctgcacgtgacttgcggggtctctacctcgttgctgacattctgaggacattttctagtcactgtgctacaatttcttaag

SEQ ID NO: 242 - DNA, 463 bp, Mus musculus; identical to SEQ ID NO: 241
  misc_feature (29)..(29): n is a, c, g, or t
  misc_feature (32)..(32): n is a, c, g, or t
  misc_feature (68)..(68): n is a, c, g, or t

SEQ ID NO: 243 - DNA, 353 bp, Mus musculus
  misc_feature (106)..(106): n is a, c, g, or t
  misc_feature (110)..(110): n is a, c, g, or t
  misc_feature (138)..(138): n is a, c, g, or t
  misc_feature (147)..(147): n is a, c, g, or t
  misc_feature (310)..(310): n is a, c, g, or t
tcagagacactgatattaggtagactttggggccagtggtgtcagccaggacagggcagagctaggactcaccagtgagttcatgtcccattctggccctgattantctntgagattctgctttcccatcccctcggntacttttgntcttccgtagtgccctcgctgtatgatatcatggtgcactttatttgcagtctgtactgcaggcaggcagaggagcttcaacaaattcagacttaacctggatgacctgacatcctcatgtttacatttccatgtgcgatgggactctgcatggccagcgctntccggtcagagatgtggtttttgaagttgtcacatgttgtctc

SEQ ID NO: 244 - DNA, 353 bp, Mus musculus; identical to SEQ ID NO: 243
  misc_feature (106)..(106): n is a, c, g, or t
  misc_feature (110)..(110): n is a, c, g, or t
  misc_feature (138)..(138): n is a, c, g, or t
  misc_feature (147)..(147): n is a, c, g, or t
  misc_feature (310)..(310): n is a, c, g, or t

SEQ ID NO: 245 - DNA, 538 bp, Mus musculus
  misc_feature (64)..(64): n is a, c, g, or t
  misc_feature (69)..(69): n is a, c, g, or t
  misc_feature (71)..(73): n is a, c, g, or t
  misc_feature (79)..(79): n is a, c, g, or t
  misc_feature (91)..(92): n is a, c, g, or t
  misc_feature (100)..(100): n is a, c, g, or t
  misc_feature (154)..(154): n is a, c, g, or t
  misc_feature (196)..(197): n is a, c, g, or t
  misc_feature (217)..(217): n is a, c, g, or t
  misc_feature (255)..(255): n is a, c, g, or t
  misc_feature (335)..(351): n is a, c, g, or t
  misc_feature (463)..(463): n is a, c, g, or t
taaacagtcggattcccctggtccgcaccagttctaagtcggctgctaggcgccggccgaggcnaggcncnnngcgganaaaccgcggccnngggggcgngacccggcgggggaacaccgacgcggaggttccccccacacgcgcgggacgccngcccgcccccgccacgcacctcgggagaggcgatgggggggnntggagcgaggccccgcgggnaggggacccgcgccggcacccgccgggctccccgggancggccgaagcttagtccgttagtgaggttattttactttgactggcgtcgtttacacgcgtactggataccgtgcgtacnnnnnnnnnnnnnnnnnatcccttcgcactggtatacgagagcggacgatgcgtcggaagttgcactaatgaattgaggctgtagcagtacgggggggtgtccaaggactgtaatttacctgcgggtanttgttggttttttaagttggtcttaattaatcggtgttggtggggttgtgcgccaacatgggtggcatgtgtttt

SEQ ID NO: 246 - DNA, 538 bp, Mus musculus; identical to SEQ ID NO: 245
  misc_feature (64)..(64): n is a, c, g, or t
  misc_feature (69)..(69): n is a, c, g, or t
  misc_feature (71)..(73): n is a, c, g, or t
  misc_feature (79)..(79): n is a, c, g, or t
  misc_feature (91)..(92): n is a, c, g, or t
  misc_feature (100)..(100): n is a, c, g, or t
  misc_feature (154)..(154): n is a, c, g, or t
  misc_feature (196)..(197): n is a, c, g, or t
  misc_feature (217)..(217): n is a, c, g, or t
  misc_feature (255)..(255): n is a, c, g, or t
  misc_feature (335)..(351): n is a, c, g, or t
  misc_feature (463)..(463): n is a, c, g, or t

SEQ ID NO: 247 - DNA, 296 bp, Mus musculus
  misc_feature (26)..(26): n is a, c, g, or t
  misc_feature (40)..(41): n is a, c, g, or t
  misc_feature (51)..(51): n is a, c, g, or t
  misc_feature (58)..(58): n is a, c, g, or t
  misc_feature (66)..(66): n is a, c, g, or t
  misc_feature (83)..(83): n is a, c, g, or t
  misc_feature (89)..(89): n is a, c, g, or t
  misc_feature (94)..(94): n is a, c, g, or t
  misc_feature (101)..(101): n is a, c, g, or t
  misc_feature (106)..(106): n is a, c, g, or t
  misc_feature (131)..(131): n is a, c, g, or t
  misc_feature (143)..(143): n is a, c, g, or t
  misc_feature (157)..(157): n is a, c, g, or t
  misc_feature (165)..(165): n is a, c, g, or t
  misc_feature (212)..(212): n is a, c, g, or t
tctagttcaggaaccttttcagctgnccaccgagaggagnnccaaagagcnggcaggnagctggangaagaaaatggctgaangtaganggccntggaaanctgcnagcagttggaggaagtcaggcagcnggaagaggagcnagcagaaggaggangttagccnaggctccggaaagaactggtgcacaaggcaaatccaatacggaagtnacgcagcagtggaggtgaaatctagcgagctgcctctgactgtgccggtgtctcctaagttctccactcggttccagtagaagc

SEQ ID NO: 248 - DNA, 296 bp, Mus musculus; identical to SEQ ID NO: 247
  misc_feature (26)..(26): n is a, c, g, or t
  misc_feature (40)..(41): n is a, c, g, or t
  misc_feature (51)..(51): n is a, c, g, or t
  misc_feature (58)..(58): n is a, c, g, or t
  misc_feature (66)..(66): n is a, c, g, or t
  misc_feature (83)..(83): n is a, c, g, or t
  misc_feature (89)..(89): n is a, c, g, or t
  misc_feature (94)..(94): n is a, c, g, or t
  misc_feature (101)..(101): n is a, c, g, or t
  misc_feature (106)..(106): n is a, c, g, or t
  misc_feature (131)..(131): n is a, c, g, or t
  misc_feature (143)..(143): n is a, c, g, or t
  misc_feature (157)..(157): n is a, c, g, or t
  misc_feature (165)..(165): n is a, c, g, or t
  misc_feature (212)..(212): n is a, c, g, or t

SEQ ID NO: 249 - DNA, 279 bp, Mus musculus
  misc_feature (78)..(89): n is a, c, g, or t
  misc_feature (94)..(94): n is a, c, g, or t
  misc_feature (158)..(197): n is a, c, g, or t
agttatgtccagatcccaggcccctctggctccaattcacactcctgagctctaaggatcacagagctgtcgtctctnnnnnnnnnnnnactcntccatgttccccggatggccacttatactctcacccctcctcttagccctccagaaagatgtgnnnnnnnnnnnnnnnnnnnnnnnnnnnnnnnnnnnnnnnnttcaggagccttccttacagcaggagggtccagaggcacctggcctgactccatcctttatgggttgcaggacattgccagg

SEQ ID NO: 250 - DNA, 279 bp, Mus musculus; identical to SEQ ID NO: 249
  misc_feature (78)..(89): n is a, c, g, or t
  misc_feature (94)..(94): n is a, c, g, or t
  misc_feature (158)..(197): n is a, c, g, or t

SEQ ID NO: 251 - DNA, 197 bp, Mus musculus
  misc_feature (75)..(75): n is a, c, g, or t
ccaccataagcctggggtcctgcttcagctgtcagccttccactcaaccttccctgtgaggaaacgccccctttntcctccgtattctggcattctggatttactcgttatgcccagcaccggtcaccttaaatagaagcaccctgagatattcctacttctcagaaactgccaaatgaatgtcatgacgtggtcag

SEQ ID NO: 252 - DNA, 197 bp, Mus musculus; identical to SEQ ID NO: 251
  misc_feature (75)..(75): n is a, c, g, or t

SEQ ID NO: 253 - DNA, 197 bp, Mus musculus
  misc_feature (27)..(41): n is a, c, g, or t
cattcacggatgtccagggagcacggnnnnnnnnnnnnnnngccagaggtactaggaaggtacaggcgggagttcgacgaggacgcaccttcccctgtcttggaaaggaggctgctcacagcgctgctggactctttaagccctgaggtcatgtgaaaagaagtttgccctgtgtccttctgtctcctgttggctgt

SEQ ID NO: 254 - DNA, 197 bp, Mus musculus; identical to SEQ ID NO: 253
  misc_feature (27)..(41): n is a, c, g, or t

SEQ ID NO: 255 - DNA, 262 bp, Mus musculus
  misc_feature (152)..(152): n is a, c, g, or t
  misc_feature (189)..(203): n is a, c, g, or t
gagttcgacgaggacgcaccttcccctgtcttggaaaggaggctgctcacagcgctgctggactctttaagccctgaggtcatgtgaaaagaagtttgccctgtgtccttctgtctcctgttggctgtccacaaaatggagaaggcggaacnaacctgaggcgtcctctttgtctgtaaagatagagannnnnnnnnnnnnnngggagatacaggaactatataggcgaggctctaccggactgcatctcttatctccagaa

SEQ ID NO: 256 - DNA, 262 bp, Mus musculus; identical to SEQ ID NO: 255
  misc_feature (152)..(152): n is a, c, g, or t
  misc_feature (189)..(203): n is a, c, g, or t

SEQ ID NO: 257 - DNA, 264 bp, Mus musculus
  misc_feature (185)..(199): n is a, c, g, or t
ccgcctgctccgtgggctttgcagtccgatacctcaatgcctacactggagtcgtgctactgcgatgccggaaggatttctaccagctcgtgtggtcagctcttcctttcatcacctatttggagaacaaaggccaccgttacccgtgcttcttcaacacattacacgtgggaggtaccatcagnnnnnnnnnnnnnnncctgatccagtacaacaggagacagctgctgatcttgttgcagaattgcactgacgaaggagagc

SEQ ID NO: 258 - DNA, 264 bp, Mus musculus; identical to SEQ ID NO: 257
  misc_feature (185)..(199): n is a, c, g, or t

SEQ ID NO: 259 - DNA, 576 bp, Mus musculus
  misc_feature (31)..(31): n is a, c, g, or t
  misc_feature (97)..(97): n is a, c, g, or t
  misc_feature (120)..(203): n is a, c, g, or t
  misc_feature (205)..(205): n is a, c, g, or t
  misc_feature (215)..(215): n is a, c, g, or t
  misc_feature (277)..(334): n is a, c, g, or t
  misc_feature (526)..(526): n is a, c, g, or t
ggcaaccattaaagagtcctggctgaaaagnctgtcccagattcagatggcctctgagaagccctgtaggtactgaggcagagggcatccatgtganccaagctggccataagcaggagnnnnnnnnnnnnnnnnnnnnnnnnnnnnnnnnnnnnnnnnnnnnnnnnnnnnnnnnnnnnnnnnnnnnnnnnnnnnnnnnnnnncnattatctggnctatttaatagattgtgttctataaccatgttctaaccattgacttacttctaagcccttgnnnnnnnnnnnnnnnnnnnnnnnnnnnnnnnnnnnnnnnnnnnnnnnnnnnnnnnnnncctggggaggggcaggagtagtaccatcttttgtgagctaagtagagttggatgtataggaacagattaccaagcacaagcaagtcttacaacagagtcaacaagtcttgcaacagataggcaggacacagcagagatcctgaggagtcaaatatgagagagccaacccagagccatcccctgtgtgctgtntcccctgtgctccaccataagtccccaataaagccttcatgtcccattgg

SEQ ID NO: 260 - DNA, 576 bp, Mus musculus; identical to SEQ ID NO: 259
  misc_feature (31)..(31): n is a, c, g, or t
  misc_feature (97)..(97): n is a, c, g, or t
  misc_feature (120)..(203): n is a, c, g, or t
  misc_feature (205)..(205): n is a, c, g, or t
  misc_feature (215)..(215): n is a, c, g, or t
  misc_feature (277)..(334): n is a, c, g, or t
  misc_feature (526)..(526): n is a, c, g, or t

SEQ ID NO: 261 - DNA, 418 bp, Mus musculus
  misc_feature (59)..(59): n is a, c, g, or t
  misc_feature (76)..(76): n is a, c, g, or t
  misc_feature (80)..(99): n is a, c, g, or t
  misc_feature (178)..(192): n is a, c, g, or t
  misc_feature (293)..(293): n is a, c, g, or t
  misc_feature (316)..(316): n is a, c, g, or t
  misc_feature (338)..(338): n is a, c, g, or t
  misc_feature (341)..(341): n is a, c, g, or t
  misc_feature (343)..(343): n is a, c, g, or t
  misc_feature (346)..(346): n is a, c, g, or t
  misc_feature (350)..(350): n is a, c, g, or t
  misc_feature (352)..(352): n is a, c, g, or t
  misc_feature (370)..(385): n is a, c, g, or t
  misc_feature (387)..(392): n is a, c, g, or t
ggcttttcctatatccacatttgtgttcttggtattctggactctctttcactacgacnggagcctcgtttacccnaagnnnnnnnnnnnnnnnnnnnnagcatgggttaaccacgcaatgcatacctccatatttcccttttcactgtttgaaaccatcctcagaccacacaactannnnnnnnnnnnnnnaggactcaccttgctgggtgcttttaattttgcctacatcatcaggatcctgtggcgctacgttcagactggaaactgggtgtaccccgtgtttgactccntcagcccactgggtattatcatnttcttctcagccgcttacatcntantngcnggcntntacctgtttggcgagaannnnnnnnnnnnnnnntnnnnnnccatagcaaagccacagatgaagaag

SEQ ID NO: 262 - DNA, 418 bp, Mus musculus; identical to SEQ ID NO: 261
  misc_feature (59)..(59): n is a, c, g, or t
  misc_feature (76)..(76): n is a, c, g, or t
  misc_feature (80)..(99): n is a, c, g, or t
  misc_feature (178)..(192): n is a, c, g, or t
  misc_feature (293)..(293): n is a, c, g, or t
  misc_feature (316)..(316): n is a, c, g, or t
  misc_feature (338)..(338): n is a, c, g, or t
  misc_feature (341)..(341): n is a, c, g, or t
  misc_feature (343)..(343): n is a, c, g, or t
  misc_feature (346)..(346): n is a, c, g, or t
  misc_feature (350)..(350): n is a, c, g, or t
  misc_feature (352)..(352): n is a, c, g, or t
  misc_feature (370)..(385): n is a, c, g, or t
  misc_feature (387)..(392): n is a, c, g, or t

SEQ ID NO: 263 - DNA, 524 bp, Mus musculus
  misc_feature (77)..(77): n is a, c, g, or t
  misc_feature (119)..(119): n is a, c, g, or t
  misc_feature (170)..(170): n is a, c, g, or t
  misc_feature (196)..(227): n is a, c, g, or t
  misc_feature (282)..(282): n is a, c, g, or t
  misc_feature (355)..(359): n is a, c, g, or t
  misc_feature (361)..(364): n is a, c, g, or t
cctggagctaggtgcccttgggactaatctctgtgactcactgagaggtgaccctgggatgagtgctggtctctgangactctgctcgaagggaaggaacttggtatgtgttcttcgtnggccctcagtctggctgacgaggctgtgggtaaacaactgtccccagaggntcagggcatcatgctgaaaaggctgnnnnnnnnnnnnnnnnnnnnnnnnnnnnnnnntctccctgcgtttcaaccattataaatttaagtttctaggttccgtgaaatgtanattttagccctgccagttctttctcgcaatacaaatttaacattcctgaataggttagactgtaataatcctnnnnntnnnnagattttgaaggataatatacaatttatattaaaatcaatattctgttgttaattaattatactttagttttatccccatctttcattagctattttgtattgatgtgtataattttctttgtgtgtattcatttttgctaaaggcctgtatcctgcaac

SEQ ID NO: 264 - DNA, 524 bp, Mus musculus; identical to SEQ ID NO: 263
  misc_feature (77)..(77): n is a, c, g, or t
  misc_feature (119)..(119): n is a, c, g, or t
  misc_feature (170)..(170): n is a, c, g, or t
  misc_feature (196)..(227): n is a, c, g, or t
  misc_feature (282)..(282): n is a, c, g, or t
  misc_feature (355)..(359): n is a, c, g, or t
  misc_feature (361)..(364): n is a, c, g, or t

SEQ ID NO: 265 - DNA, 520 bp, Mus musculus
  misc_feature (178)..(178): n is a, c, g, or t
  misc_feature (273)..(273): n is a, c, g, or t
  misc_feature (376)..(376): n is a, c, g, or t
  misc_feature (386)..(386): n is a, c, g, or t
  misc_feature (390)..(390): n is a, c, g, or t
  misc_feature (461)..(461): n is a, c, g, or t
  misc_feature (471)..(471): n is a, c, g, or t
  misc_feature (476)..(476): n is a, c, g, or t
  misc_feature (481)..(481): n is a, c, g, or t
ggcctttgaggtggtccaaggctccctcccagggcaggggtaggggtggagctgggaaggagggagagatttgccggaagagcacagccagctctctgctccgagcctgcatctacatttctcaagttttccacacgtcccatatggacagggccgcctcagccccctcaggaaattntgctccttccagcatctttttccattctggctgcctcctcggagcgcctgcctccaggacttttaaccagtttttaaaatggaacttttctctcntgccatccttggctgaggggagcagccagcctgcagcccacactggtttggaggtcaggagtggagctcttgaaaccatgagttctgggttcacaggctgccntgctagatgncctnccggagcccttcttcctgggtgctttccttcttagattatacctagcaaaaaactctcagctgtgtccagngaagtaaaanaaaanaaaanaaaattttaaaaaatcatccaatcccagcagggctggaa

SEQ ID NO: 266 - DNA, 520 bp, Mus musculus; identical to SEQ ID NO: 265
  misc_feature (178)..(178): n is a, c, g, or t
  misc_feature (273)..(273): n is a, c, g, or t
  misc_feature (376)..(376): n is a, c, g, or t
  misc_feature (386)..(386): n is a, c, g, or t
  misc_feature (390)..(390): n is a, c, g, or t
  misc_feature (461)..(461): n is a, c, g, or t
  misc_feature (471)..(471): n is a, c, g, or t
  misc_feature (476)..(476): n is a, c, g, or t
  misc_feature (481)..(481): n is a, c, g, or t

SEQ ID NO: 267 - DNA, 449 bp, Mus musculus
  misc_feature (28)..(28): n is a, c, g, or t
  misc_feature (32)..(32): n is a, c, g, or t
  misc_feature (353)..(353): n is a, c, g, or t
ggctctccgtcttggcattggggacacnggantggggtgaagtttggggaagaaaattctggggcctttctagccacagggagaaggaagatggaggagctgggctgcttctcccagaagtattagtgtcctttccatgtcacagctcatcctgttcctcataccactctgcccctctccttggtccccctcccccacccccaaggcaggaggcagaaccctgactgccccagagtggtatttctgtccctatggggccataagactgaaagactcaccctcccgagtctctcgcacctttcacggtcatcccctatcccctgtcttgtgatggatcgaggaggccctgggcntggacaaagcacctaagctccctgtacaaacctgcacgcctttccccgaagcaaagcacaatttatagggtccatgcagcaggatctaggatcccc

SEQ ID NO: 268 - DNA, 449 bp, Mus musculus; identical to SEQ ID NO: 267
  misc_feature (28)..(28): n is a, c, g, or t
  misc_feature (32)..(32): n is a, c, g, or t
  misc_feature (353)..(353): n is a, c, g, or t

SEQ ID NO: 269 - DNA, 360 bp, Mus musculus
  misc_feature (144)..(181): n is a, c, g, or t
  misc_feature (319)..(319): n is a, c, g, or t
  misc_feature (328)..(328): n is a, c, g, or t
gagccctcttatctgaataataagtatgcccatacattctttaagaagtagtctgttggtccaagaagccaaacactaaagatgctaaatttaactcttgtgtttctgaaattgagaagctgttggtaaattattacttgtatnnnnnnnnnnnnnnnnnnnnnnnnnnnnnnnnnnnnnntgtcattaggaaatgtggttactttcccaaacagtgatattttattgtaaaactttaaaaagtattatgccactcaccaaaagtaagcatttgaaaatttaattttaagtcatttgtttaaaaccactttttattgtntatatatanacattttttccccctgaggaatcctgagatag

SEQ ID NO: 270 - DNA, 362 bp, Mus musculus
  misc_feature (144)..(181): n is a, c, g, or t
  misc_feature (319)..(319): n is a, c, g, or t
  misc_feature (328)..(328): n is a, c, g, or t
gagccctcttatctgaataataagtatgcccatacattctttaagaagtagtctgttggtccaagaagccaaacactaaagatgctaaatttaactcttgtgtttctgaaattgagaagctgttggtaaattattacttgtatnnnnnnnnnnnnnnnnnnnnnnnnnnnnnnnnnnnnnntgtcattaggaaatgtggttactttcccaaacagtgatattttattgtaaaactttaaaaagtattatgccactcaccaaaagtaagcatttgaaaatttaattttaagtcatttgtttaaaaccactttttattgtntatatatanacattttttccccctgaggaatcctgagatagtt

SEQ ID NO: 271 - DNA, 238 bp, Mus musculus
  misc_feature (173)..(173): n is a, c, g, or t
cagccgcagtagtggccaagaaaacgccgatctgaggccgctgccgctgtcttataatcttctagatggagacgcgacactcccagccatcgtctttttgcatgggctcttcggcagcaaaaccaacttcaactccctcgccaaggcaatggttcagaggactggccggaggntgctgacggtggatgcccggaaccacggtgacagcccccacagtccagacgcaagctatgaggcc

SEQ ID NO: 272 - DNA, 238 bp, Mus musculus; identical to SEQ ID NO: 271
  misc_feature (173)..(173): n is a, c, g, or t

SEQ ID NO: 273 - DNA, 277 bp, Mus musculus
  misc_feature (140)..(178): n is a, c, g, or t
ccatagttcatatgccacatgtagtatttctgtatttgaaagtagcccaaagatgagcattctaattctaaaatgaaaccagcagcctcatacaagcacattctttggttgagtcatggtctaacagttaataaatgacnnnnnnnnnnnnnnnnnnnnnnnnnnnnnnnnnnnnnnnttgataattaacaatgtactgtatgaattaagtgacatgttaaccctgactttatgtttcaaggttaaaatatgggcattatctcatcagacttatggg

SEQ ID NO: 274 - DNA, 277 bp, Mus musculus; identical to SEQ ID NO: 273
  misc_feature (140)..(178): n is a, c, g, or t

SEQ ID NO: 275 - DNA, 310 bp, Mus musculus
  misc_feature (259)..(273): n is a, c, g, or t
agcaagaccaggaaagttgggtcctgccagtggctttcaccaagagctgcagagtgagcaccaggttttgtgggaagagtcagaaattcttcgggaggaactgaagttgcttcgagaccagctgagccaacatcaggagttgttgctggaacaaatagctaaagggccccaggttcaggcccgcagctggaagaagttggagcacctgcagagtgaccagatggacagggttcataccttggaggtttccagtacagannnnnnnnnnnnnnngaaggaagagccctacctcctcagctctgaagtcagt

SEQ ID NO: 276 - DNA, 310 bp, Mus musculus; identical to SEQ ID NO: 275
  misc_feature (259)..(273): n is a, c, g, or t

SEQ ID NO: 277 - DNA, 540 bp, Mus musculus
  misc_feature (140)..(154): n is a, c, g, or t
  misc_feature (163)..(181): n is a, c, g, or t
  misc_feature (183)..(183): n is a, c, g, or t
  misc_feature (187)..(187): n is a, c, g, or t
  misc_feature (196)..(196): n is a, c, g, or t
  misc_feature (256)..(291): n is a, c, g, or t
  misc_feature (386)..(386): n is a, c, g, or t
  misc_feature (389)..(389): n is a, c, g, or t
  misc_feature (392)..(392): n is a, c, g, or t
  misc_feature (395)..(396): n is a, c, g, or t
  misc_feature (399)..(399): n is a, c, g, or t
  misc_feature (401)..(401): n is a, c, g, or t
  misc_feature (418)..(418): n is a, c, g, or t
  misc_feature (436)..(436): n is a, c, g, or t
  misc_feature (454)..(455): n is a, c, g, or t
  misc_feature (461)..(461): n is a, c, g, or t
  misc_feature (465)..(465): n is a, c, g, or t
  misc_feature (470)..(470): n is a, c, g, or t
  misc_feature (482)..(482): n is a, c, g, or t
  misc_feature (500)..(500): n is a, c, g, or t
gacaactgggtttgtcctccctactcccaccccaagtggtcaataagtcttatttgcaaaagccatgatcttcaagggtgagagaaaaatctgaaggtcagcggagacctcagagaaaacgggggcaaagtgtcttaggnnnnnnnnnnnnnnnagcattgtnnnnnnnnnnnnnnnnnnncncccnacccctctntaccccaccccacccaagacagccttccactagaggctgaagccaggaagcagacagttnnnnnnnnnnnnnnnnnnnnnnnnnnnnnnnnnnnngaacaacgcagtgtggggacagtgggtgactcagaactctgctggtacctgggggtggagctatcacttcctccagagggaggacatcccagggntancanaanngantnagagtattttcccaganctggcgtggagggggccntcagcgagaggtgacaanntaggantgantcagnttcagcaccccntggggctggatggggatntccctcgggggacaaggacggacatgcacagagagaacca

SEQ ID NO: 278 - DNA, 540 bp, Mus musculus; identical to SEQ ID NO: 277
  misc_feature (140)..(154): n is a, c, g, or t
  misc_feature (163)..(181): n is a, c, g, or t
  misc_feature (183)..(183): n is a, c, g, or t
  misc_feature (187)..(187): n is a, c, g, or t
  misc_feature (196)..(196): n is a, c, g, or t
  misc_feature (256)..(291): n is a, c, g, or t
  misc_feature (386)..(386): n is a, c, g, or t
  misc_feature (389)..(389): n is a, c, g, or t
  misc_feature (392)..(392): n is a, c, g, or t
  misc_feature (395)..(396): n is a, c, g, or t
  misc_feature (399)..(399): n is a, c, g, or t
  misc_feature (401)..(401): n is a, c, g, or t
  misc_feature (418)..(418): n is a, c, g, or t
  misc_feature (436)..(436): n is a, c, g, or t
  misc_feature (454)..(455): n is a, c, g, or t
  misc_feature (461)..(461): n is a, c, g, or t
  misc_feature (465)..(465): n is a, c, g, or t
  misc_feature (470)..(470): n is a, c, g, or t
  misc_feature (482)..(482): n is a, c, g, or t
  misc_feature (500)..(500): n is a, c, g, or t

SEQ ID NO: 279 - DNA, 458 bp, Mus musculus
  misc_feature (26)..(26): n is a, c, g, or t
  misc_feature (32)..(32): n is a, c, g, or t
  misc_feature (34)..(34): n is a, c, g, or t
  misc_feature (39)..(40): n is a, c, g, or t
  misc_feature (67)..(67): n is a, c, g, or t
  misc_feature (79)..(79): n is a, c, g, or t
  misc_feature (83)..(83): n is a, c, g, or t
  misc_feature (129)..(129): n is a, c, g, or t
  misc_feature (137)..(137): n is a, c, g, or t
agacatacatgcaggcaaacacccanattacnanagaannaaatccaggtttggcaatttgagtttntcctagtactcntacntcagtactcctacctcaagatgagaagcagagacggaagaaccatntggaagcntcaggagcagccagcctggagtacacggtgtgggagacctaagcctggagtacgcggtgtgggagacctaggagagaggcttcagagaggtggagagtgagagccaatgagaattgtttttctgacctcacatgtgcacaaataagtaaataaagtggatttgtttgcacactgtagaaaaacagaattgtaagtcctgaaaggaaagtcttgtggcttagttgtgttgtatgattatccatctccacaaagggaagcatgggagccgacaagagatacatgaacaggtcgcaggtcaagcatctgctgatgatacattta

SEQ ID NO: 280 - DNA, 458 bp, Mus musculus; identical to SEQ ID NO: 279
  misc_feature (26)..(26): n is a, c, g, or t
  misc_feature (32)..(32): n is a, c, g, or t
  misc_feature (34)..(34): n is a, c, g, or t
  misc_feature (39)..(40): n is a, c, g, or t
  misc_feature (67)..(67): n is a, c, g, or t
  misc_feature (79)..(79): n is a, c, g, or t
  misc_feature (83)..(83): n is a, c, g, or t
  misc_feature (129)..(129): n is a, c, g, or t
  misc_feature (137)..(137): n is a, c, g, or t

SEQ ID NO: 281 - DNA, 317 bp, Mus musculus
ctagcgaagactgagtgtgatctgcacctaacgttcacaccaacagtcccagcagacattgttggcaatgtcatttacaagcaggctcctcctacgaggctgggtcggctggctgaacctagttcagaggaggaaggagatcgagaggcgcgaggccgcaaaacgggaactggaaaggcagcgacaacttgaatgggaacggaaccggagacaggaactcctgaatcagaggaacaaggagcaggagggcaccgtggtcctgaaggcaaggaggaagactctggagtttgagttagaagctctgaatgacaaaaagc

SEQ ID NO: 282 - DNA, 317 bp, Mus musculus; identical to SEQ ID NO: 281

SEQ ID NO: 283 - DNA, 334 bp, Mus musculus
  misc_feature (99)..(99): n is a, c, g, or t
  misc_feature (131)..(131): n is a, c, g, or t
gagtgccaaagagttgagtgccttcattaacggagcctgcccttcccacgggcagctctagctgtaggaactacggttaggaccttgggctcgatgaanccagtttgttttgagtcatggtagatttaggncaaagcataaatactgttctctgcatttcatctgttgctcagcaagacctggtaaagtatttcctttgtccaagtcctctgacattgtcctcaacacaggagggcacagaagcagcggtgagggcacagactggtcttgcagttctggttcggagtctctaacttcagcattcggaattcctgtcttcttgtcagtagacaag

SEQ ID NO: 284 - DNA, 334 bp, Mus musculus; identical to SEQ ID NO: 283
  misc_feature (99)..(99): n is a, c, g, or t
  misc_feature (131)..(131): n is a, c, g, or t

SEQ ID NO: 285 - DNA, 574 bp, Mus musculus
  misc_feature (58)..(58): n is a, c, g, or t
  misc_feature (84)..(84): n is a, c, g, or t
  misc_feature (93)..(93): n is a, c, g, or t
  misc_feature (98)..(101): n is a, c, g, or t
  misc_feature (103)..(103): n is a, c, g, or t
  misc_feature (106)..(107): n is a, c, g, or t
  misc_feature (132)..(146): n is a, c, g, or t
  misc_feature (234)..(236): n is a, c, g, or t
  misc_feature (240)..(240): n is a, c, g, or t
  misc_feature (245)..(245): n is a, c, g, or t
  misc_feature (247)..(251): n is a, c, g, or t
  misc_feature (253)..(253): n is a, c, g, or t
  misc_feature (255)..(255): n is a, c, g, or t
  misc_feature (259)..(260): n is a, c, g, or t
  misc_feature (262)..(263): n is a, c, g, or t
  misc_feature (298)..(298): n is a, c, g, or t
  misc_feature (373)..(373): n is a, c, g, or t
  misc_feature (375)..(375): n is a, c, g, or t
  misc_feature (509)..(509): n is a, c, g, or t
ggtggccaacatccagcccacagaagctccaatggcacctgcgtcaccaacagaagancacagctctagtcacacacccacttnccatgtcanagcannnncngtnnccaaggagaaatcaccccaagacannnnnnnnnnnnnnntgatctgtgagtctgagaccaccacccccttcctgatcatgcaagaagtggagaatgccttaagttcaggcagcatcgccgccatcannntganagtcntnnnnntngngttnntnntgtttggaggtgcagcatacctgaagatcaggcantcctcctatggaaggctgctggacgaccatgactacgggtcctgggggaactacaacaaccctctctacgatgantnttaacgaagaaaggtggctgaggacaagaagtagcggtcctttatttataagtgcttatccagtagaataataacaagtacctgatgtacactgaacgacaatcgcgagccctcttttgttggtatggttgttnttgtttttttttcccttccccttctctggctgctactacagaatgtctcccttctgatacaaaag

SEQ ID NO: 286 - DNA, 574 bp, Mus musculus; identical to SEQ ID NO: 285
  misc_feature (58)..(58): n is a, c, g, or t
  misc_feature (84)..(84): n is a, c, g, or t
  misc_feature (93)..(93): n is a, c, g, or t
  misc_feature (98)..(101): n is a, c, g, or t
  misc_feature (103)..(103): n is a, c, g, or t
  misc_feature (106)..(107): n is a, c, g, or t
  misc_feature (132)..(146): n is a, c, g, or t
  misc_feature (234)..(236): n is a, c, g, or t
  misc_feature (240)..(240): n is a, c, g, or t
  misc_feature (245)..(245): n is a, c, g, or t
  misc_feature (247)..(251): n is a, c, g, or t
  misc_feature (253)..(253): n is a, c, g, or t
  misc_feature (255)..(255): n is a, c, g, or t
  misc_feature (259)..(260): n is a, c, g, or t
  misc_feature (262)..(263): n is a, c, g, or t
  misc_feature (298)..(298): n is a, c, g, or t
  misc_feature (373)..(373): n is a, c, g, or t
  misc_feature (375)..(375): n is a, c, g, or t
  misc_feature (509)..(509): n is a, c, g, or t

SEQ ID NO: 287 - DNA, 297 bp, Mus musculus
  misc_feature (113)..(144): n is a, c, g, or t
  misc_feature (177)..(177): n is a, c, g, or t
  misc_feature (183)..(183): n is a, c, g, or t
  misc_feature (212)..(227): n is a, c, g, or t
gtgggctccagcttatgcagactgttgagaagcgacacaaccttatgtttatctcctttcccctcaaccccgtgcctattctaaggaattcccgaagacctgaatgtgatgtnnnnnnnnnnnnnnnnnnnnnnnnnnnnnnnnctgttcactgttagctagacatgctccccaaancgaaantgactagagtgtgtcaccctttccttacnnnnnnnnnnnnnnnnccacgtcatggatgtagagatggcatgtatgtgaggttccaccacccacaccacagcagagggattgaat

SEQ ID NO: 288 - DNA, 297 bp, Mus musculus; identical to SEQ ID NO: 287
  misc_feature (113)..(144): n is a, c, g, or t
  misc_feature (177)..(177): n is a, c, g, or t
  misc_feature (183)..(183): n is a, c, g, or t
  misc_feature (212)..(227): n is a, c, g, or t

SEQ ID NO: 289 - DNA, 450 bp, Mus musculus
  misc_feature (26)..(49): n is a, c, g, or t
  misc_feature (333)..(333): n is a, c, g, or t
  misc_feature (341)..(342): n is a, c, g, or t
  misc_feature (346)..(346): n is a, c, g, or t
  misc_feature (409)..(425): n is a, c, g, or t
accagcagcaattaggacgtttcaannnnnnnnnnnnnnnnnnnnnnnngtagctgctgaaccatttcttagtgggactagttcgaactatgtggaggaaatgtactgtgcctggttggagaatcccaaaagtgtacataaggtaaggctcacagagtagtcctctgctctgtatgttggtcaggtgctcactgactgccaggtaagtgagtatatccagaagagtcagtgggcaggcaggcaactagaacccggcaccatccaccatgtctactgcgtcagactcagtgtggcctcagtggaaaccacagtcctcttgagttgtttccagcnatgagctnnacantcaaagcacacaatgaagcatgtgtagccagcccttcaaggatctgaggaaatgcaagtgtgnnnnnnnnnnnnnnnnnggaagcacaagactggccctccggg

SEQ ID NO: 290 - DNA, 450 bp, Mus musculus; identical to SEQ ID NO: 289
  misc_feature (26)..(49): n is a, c, g, or t
  misc_feature (333)..(333): n is a, c, g, or t
  misc_feature (341)..(342): n is a, c, g, or t
  misc_feature (346)..(346): n is a, c, g, or t
  misc_feature (409)..(425): n is a, c, g, or t

SEQ ID NO: 291 - DNA, 518 bp, Mus musculus
  misc_feature (213)..(238): n is a, c, g, or t
  misc_feature (440)..(455): n is a, c, g, or t
acgcgtcaactaggtacgcgattcggcttccactttaagagacctatttcggcttcaaaacaccacagttcgatacaagttttaaacatgctcagccatcaaatgaaacgaaatgcactgggctttcggccttaattacaaaacgacacaaaacacaactcctggagagttaactaccccaaacacaacttaactctccacccttgcctaaannnnnnnnnnnnnnnnnnnnnnnnnnccggacctgtttgaaacacacccactttgcactattcctattagaaaagccatgcacttctcttccaaaatgaaaagtcttggtcgacacctaagagggggacatggggtaggtgggtggtaattctttggagatgcgcaacggactctctccgcagttgcaaatagggactaaaaggtcggcaagcgtcctttgcctcctnnnnnnnnnnnnnnnnggccagctgccctagaacccggggaaagtgaaagttcgcttggcaccggcaaaggcattgaag

SEQ ID NO: 292 - DNA, 518 bp, Mus musculus; identical to SEQ ID NO: 291
  misc_feature (213)..(238): n is a, c, g, or t
  misc_feature (440)..(455): n is a, c, g, or t

SEQ ID NO: 293 - DNA, 290 bp, Mus musculus
  misc_feature (43)..(43): n is a, c, g, or t
  misc_feature (96)..(96): n is a, c, g, or t
ggtgcccatgccagccttcgctataacccccgtgagcgccacntgtatgcctgggatgatggctaccagattgtctacaaattggagatgaagaanaaggaggaggaagtttaagcagctagccttgtgctcttgattcttatgcccagacatttatattcctgtgagctctcctgcagttcatccttcaaaacgaaggccagtggtggtagctcatataccctaatttctaaaggacaaccaaattctcaagcccctctgttttatgcagaactccagatcctgggtag

SEQ ID NO: 294 - DNA, 290 bp, Mus musculus; identical to SEQ ID NO: 293
  misc_feature (43)..(43): n is a, c, g, or t
  misc_feature (96)..(96): n is a, c, g, or t

SEQ ID NO: 295 - DNA, 491 bp, Mus musculus
  misc_feature (27)..(41): n is a, c, g, or t
  misc_feature (101)..(115): n is a, c, g, or t
  misc_feature (344)..(344): n is a, c, g, or t
cccaagctccacacctgtgagaaatgnnnnnnnnnnnnnnngaaccaggcggtccgcatccaggaggggaggtaccgacaccctggctgctacacttgcgnnnnnnnnnnnnnnnacctgaagatgcgcggccacttctgggtgggcaatgagttgtactgcgagaagcatgcccgccagcgctactctatgcctggaactctcaactctcgagcctgagcctcaaggtgctcggcctgtctgcactctcagactctgcagacatgattatactgagagcaagcagggaaggggtgatagcaggtgatagatgatcttacatgaactaaggttggggagtcccntttgtccttgctgggtgaggccaagggttgggactaatgtcaggttgctagtgctaaggacagttccactctctctggccttcctcctgcaggccaggttctgtattacggtctacagtggctgccatgtttgacacgaaagcgtat

SEQ ID NO: 296 - DNA, 491 bp, Mus musculus; identical to SEQ ID NO: 295
  misc_feature (27)..(41): n is a, c, g, or t
  misc_feature (101)..(115): n is a, c, g, or t
  misc_feature (344)..(344): n is a, c, g, or t

SEQ ID NO: 297 - DNA, 325 bp, Mus musculus
  misc_feature (100)..(100): n is a, c, g, or t
  misc_feature (117)..(117): n is a, c, g, or t
gcacgatgcacaatatccaacgactcaataaatactttacaaaaataatgcagttttttttcttaaaacataaaaatattaggatttcccaggcttcagntcccatcacccccttcnatatttatttactgggaatatattggtgaagaaaagtcactctattaagataaaatagacaaaacggggcccctattatttttcgacttgtgttttttctttggaaagtgccactcctggctttacacctgaacttccttcagtcttctgagcccgttaagatagagcagagctcctgctgggctcttcagtacaattatgttggtca

SEQ ID NO: 298 - DNA, 325 bp, Mus musculus; identical to SEQ ID NO: 297
  misc_feature (100)..(100): n is a, c, g, or t
  misc_feature (117)..(117): n is a, c, g, or t

SEQ ID NO: 299 - DNA, 430 bp, Mus musculus
  misc_feature (142)..(142): n is a, c, g, or t
  misc_feature (280)..(280): n is a, c, g, or t
  misc_feature (360)..(360): n is a, c, g, or t
cttgctctgaatctagaaatagagtgaagaggcgtcttgactcaagctgtctggagagtgtgaaacaaaagtgtgtgaagagttgcaactgtgtcactgagcttgacggccaagcggagagtcttcgtttggatctgtgctncctttccggcacccaggaagtccttagccaagactccgagggtcctaccaaatcaagcaagactgaaggtgctggcacaagcatctcagaacctccttctcctgtcagtccttatgcttctgaaggctgtggaccacngcctcttcctttgagaccttgtggagaaggatctgagatggtgggcaaagagaatagctctccagagaataagaactggntgttggccatagcagccaaacgcaaggcagaaaattcatccccaagaagtccatcatctcagacacccag

SEQ ID NO: 300 - DNA, 430 bp, Mus musculus; identical to SEQ ID NO: 299
  misc_feature (142)..(142): n is a, c, g, or t
  misc_feature (280)..(280): n is a, c, g, or t
  misc_feature (360)..(360): n is a, c, g, or t

SEQ ID NO: 301 - DNA, 364 bp, Mus musculus
  misc_feature (72)..(73): n is a, c, g, or t
  misc_feature (76)..(77): n is a, c, g, or t
  misc_feature (79)..(81): n is a, c, g, or t
  misc_feature (226)..(226): n is a, c, g, or t
agctttcatgctaccgtggccactcacccaacgccattgtcttctcttttggaggcctcaaagtgtctgatnnggnncnnncaggattcctgctcaatatcatcggagtgctgactatcacattatccataaacagctggagtatccctatcttcaagctggacacatttcccacctgggcctactccaacacaagccagtgccttctcaatccgcctaattccantgtaccaggccactagactatggtacaacctagctctgctaggggaaaagccgctggtgccactcctcggagccaggagagggcgctccaaactccaagtcccgggacagaggtgcagaatcggctggcgcatgcgaa

SEQ ID NO: 302 - DNA, 364 bp, Mus musculus; identical to SEQ ID NO: 301
  misc_feature (72)..(73): n is a, c, g, or t
  misc_feature (76)..(77): n is a, c, g, or t
  misc_feature (79)..(81): n is a, c, g, or t
  misc_feature (226)..(226): n is a, c, g, or t

SEQ ID NO: 303 - DNA, 583 bp, Mus musculus
  misc_feature (64)..(64): n is a, c, g, or t
  misc_feature (67)..(67): n is a, c, g, or t
  misc_feature (100)..(100): n is a, c, g, or t
  misc_feature (198)..(214): n is a, c, g, or t
  misc_feature (217)..(217): n is a, c, g, or t
  misc_feature (328)..(328): n is a, c, g, or t
  misc_feature (336)..(336): n is a, c, g, or t
  misc_feature (374)..(374): n is a, c, g, or t
  misc_feature (379)..(379): n is a, c, g, or t
  misc_feature (399)..(399): n is a, c, g, or t
  misc_feature (432)..(432): n is a, c, g, or t
  misc_feature (461)..(548): n is a, c, g, or t
atcagcccagcttttagaagactggggtatggaagacatcgaccatgtgttctcagaggaggantancggaccctcaccaactacaaggccttcagccantttgttagacccctgattgctgctaaaaaccccaagattgctgtctccaagatgatgatggtcttgggtgcaaagtggagggaattcagtaccaacannnnnnnnnnnnnnnnntcnggagcatcagtggcagctgcggcggcggcggctgtggctgtggttgagagcatggtgacagctactgaagtcgcccctccccctccccctgtggaggtgccgatccgcaangccaaganccaaggagggcaaaggtcccaatgctcggaggaagccnaaagncagcccgcgagtgcctgacnccaagaagcccaaacccaagaaagtagctcctntgaagatcaagctgggagggttcggctcnnnnnnnnnnnnnnnnnnnnnnnnnnnnnnnnnnnnnnnnnnnnnnnnnnnnnnnnnnnnnnnnnnnnnnnnnnnnnnnnnnnnnnnngatggttccaccagccgcagtagtcggagccgtaa

SEQ ID NO: 304 - DNA, 583 bp, Mus musculus; identical to SEQ ID NO: 303
  misc_feature (64)..(64): n is a, c, g, or t
  misc_feature (67)..(67): n is a, c, g, or t
  misc_feature (100)..(100): n is a, c, g, or t
  misc_feature (198)..(214): n is a, c, g, or t
  misc_feature (217)..(217): n is a, c, g, or t
  misc_feature (328)..(328): n is a, c, g, or t
  misc_feature (336)..(336): n is a, c, g, or t
  misc_feature (374)..(374): n is a, c, g, or t
  misc_feature (379)..(379): n is a, c, g, or t
  misc_feature (399)..(399): n is a, c, g, or t
  misc_feature (432)..(432): n is a, c, g, or t
  misc_feature (461)..(548): n is a, c, g, or t

SEQ ID NO: 305 - DNA, 414 bp, Mus musculus
  misc_feature (28)..(28): n is a, c, g, or t
  misc_feature (87)..(87): n is a, c, g, or t
  misc_feature (192)..(192): n is a, c, g, or t
  misc_feature (227)..(247): n is a, c, g, or t
  misc_feature (302)..(302): n is a, c, g, or t
  misc_feature (327)..(327): n is a, c, g, or t
  misc_feature (344)..(344): n is a, c, g, or t
  misc_feature (346)..(346): n is a, c, g, or t
  misc_feature (348)..(348): n is a, c, g, or t
  misc_feature (353)..(353): n is a, c, g, or t
tgagggagtgctggtaactgaccctgtnttggcgtgttaaggatttccatgtgacgcctcctccagaaaaggagtccatgaagtcantcaaaaattcccaaaaggacatttatacaggacaactttacatagtgttttgttttagaatcgaatatgaccagatgagtcttgtttgggtgtgcaaaaaaaaanagctcagtatttctaaagtaacagagttgagtaannnnnnnnnnnnnnnnnnnnntaggtagccatccgcacttactagtctggaaactttaaatagtgccaactatgangcccaagttcttactgaattttatntagtaggggctgataantntntcttntatttggttttcacatatagctcttaaggacttgaagaactgttatgtcaggtatttacac

SEQ ID NO: 306 - DNA, 414 bp, Mus musculus; identical to SEQ ID NO: 305
  misc_feature (28)..(28): n is a, c, g, or t
  misc_feature (87)..(87): n is a, c, g, or t
  misc_feature (192)..(192): n is a, c, g, or t
  misc_feature (227)..(247): n is a, c, g, or t
  misc_feature (302)..(302): n is a, c, g, or t
  misc_feature (327)..(327): n is a, c, g, or t
  misc_feature (344)..(344): n is a, c, g, or t
  misc_feature (346)..(346): n is a, c, g, or t
  misc_feature (348)..(348): n is a, c, g, or t
  misc_feature (353)..(353): n is a, c, g, or t

SEQ ID NO: 307 - DNA, 112 bp, Mus musculus
  misc_feature (26)..(26): n is a, c, g, or t
tttttccttgtaatgcgaacgctaanctttagactgtggggttcaccacgcagcccagaggtcctctctctctctctgacatgaaagacgtgtccatgtcctcatagcctgg

SEQ ID NO: 308 - DNA, 112 bp, Mus musculus; identical to SEQ ID NO: 307
  misc_feature (26)..(26): n is a, c, g, or t

SEQ ID NO: 309 - DNA, 535 bp, Mus musculus
  misc_feature (39)..(65): n is a, c, g, or t
  misc_feature (95)..(171): n is a, c, g, or t
  misc_feature (496)..(510): n is a, c, g, or t
cttttgccagacttgagaagagagagaaaagacgagaannnnnnnnnnnnnnnnnnnnnnnnnnnaagacagaagttaagcctgaatgcaaagannnnnnnnnnnnnnnnnnnnnnnnnnnnnnnnnnnnnnnnnnnnnnnnnnnnnnnnnnnnnnnnnnnnnnnnnnnnnaagtgaacagaactaagcagagaaagagcttttctcgtagtaggactcacattggacagcagcgtcggagacacagaactgtcagcatgtgttcagacataccgccatcttctcctgacatcgaagttctgtcacaacagaacgagattgaaaatactgtacttgctatagaaccagaaactgaaactgcagtagcagaaataattcctgaagcggaagttccagcacttaataagtgtcccacaaagtaccccagaacaaagaagcacttggtcaatgaatggttaagtgagaagaatgagaagacaggaaaaccttcagacannnnnnnnnnnnnnnctttgcgcataactacagatccaga

SEQ ID NO: 310 - DNA, 535 bp, Mus musculus; identical to SEQ ID NO: 309
  misc_feature (39)..(65): n is a, c, g, or t
  misc_feature (95)..(171): n is a, c, g, or t
  misc_feature (496)..(510): n is a, c, g, or t

SEQ ID NO: 311 - DNA, 235 bp, Mus musculus
  misc_feature (209)..(209): n is a, c, g, or t
agactggcatgactgcatttccactcattgatagtgtggaccctcacggtttcatctcctaccgtctgttccgggacgccaccagatatatggagggacatcatgtgaaggacatctcctgtctgaatcgggacccagcccgagtagtagtcgtggactgcaagaaggaagctttccgcctccagcccttcaacggtgttgccctgcgnccctgggatggcaactcagatgaccg

SEQ ID NO: 312 - DNA, 235 bp, Mus musculus; identical to SEQ ID NO: 311
  misc_feature (209)..(209): n is a, c, g, or t

SEQ ID NO: 313 - DNA, 379 bp, Mus musculus
cccagggctgtaagctgagacccctgggatccctgtctaagctagatgccccttccctccattcagcagagtgagaactagtggctccgtgtcacagcctagcaggggcagctacggaaccaccacgctgcttctcccgagtggggatagggcactctgtgggaaccaccacgctgcttctcccgagtggggatagggcactctgtgggaacagtgtccggcccctccctctcgcttctccaccccctccaccccagccttactccacaccgtgcagacaatcattttgtatgggttaagagccacgtcgtcggaaggttttatacagtgatttgttacctaggaacgcactgtgcccagatttctggtgtgccaataa

SEQ ID NO: 314 - DNA, 379 bp, Mus musculus; identical to SEQ ID NO: 313

SEQ ID NO: 315 - DNA, 460 bp, Mus musculus
  misc_feature (61)..(61): n is a, c, g, or t
  misc_feature (114)..(128): n is a, c, g, or t
  misc_feature (134)..(134): n is a, c, g, or t
  misc_feature (339)..(339): n is a, c, g, or t
  misc_feature (348)..(348): n is a, c, g, or t
  misc_feature (420)..(420): n is a, c, g, or t
  misc_feature (435)..(435): n is a, c, g, or t
caggcttctgaagagggagcagacagaaatgggggccctggggaggatgctgccgaggggnagaccaagacagcagcagggaaacggaagcggccaaagcactcaggagctgannnnnnnnnnnnnnnaaaaangatgaagttaccagagcagcctgaagagggagaggccaaggaccacgaggctccatcgaaaggtaaattcaactggaaggggaccattaaggctgttttgaaacaggctccagacaacgagatatcagtcaagaagttaaagaaaaaggttatagctcagtaccatgcggtgatgaacgaccatcacacatcggaggaggagctnctggccatnttcaacaggaagatcagcaggaaccccacctttaaggtgctgaaggacagagtaaagcttctgaagtgaggntctgtggcttcacantctgtcatcctattggctgcttccc

SEQ ID NO: 316 - DNA, 460 bp, Mus musculus; identical to SEQ ID NO: 315
  misc_feature (61)..(61): n is a, c, g, or t
  misc_feature (114)..(128): n is a, c, g, or t
  misc_feature (134)..(134): n is a, c, g, or t
  misc_feature (339)..(339): n is a, c, g, or t
  misc_feature (348)..(348): n is a, c, g, or t
  misc_feature (420)..(420): n is a, c, g, or t
  misc_feature (435)..(435): n is a, c, g, or t

SEQ ID NO: 317 - DNA, 424 bp, Mus musculus
  misc_feature (131)..(131): n is a, c, g, or t
  misc_feature (134)..(134): n is a, c, g, or t
  misc_feature (143)..(143): n is a, c, g, or t
  misc_feature (154)..(154): n is a, c, g, or t
  misc_feature (172)..(172): n is a, c, g, or t
  misc_feature (177)..(177): n is a, c, g, or t
  misc_feature (182)..(182): n is a, c, g, or t
  misc_feature (203)..(203): n is a, c, g, or t
  misc_feature (205)..(205): n is a, c, g, or t
  misc_feature (396)..(396): n is a, c, g, or t
ctggaaccaatgtggccctcctggaggccggatgctctggcttcttctggtcctataggtcacagagccacgcccactttctcccattttgttatatttaagattgggagcccagtttccagtgggttgtnatngggtcttcnttgtacagagnacgacgtggaggaacttncgcanccccnccccacaccctgcctttgggntngagtaaacatctgggttgcaagccatttaaaattgcttctttgccagggtgaattctggcaaagcctacacaaatcgcctgtacgatagcactgtataaaagtttatctgtcaccatacctgcaatgatttggctgttgcagccagtgcccacagctcctgtgtccttgtctctagcagggcggtacctgncagcagccaagggcaaggcttgctggaa

SEQ ID NO: 318 - DNA, 424 bp, Mus musculus; identical to SEQ ID NO: 317
  misc_feature (131)..(131): n is a, c, g, or t
  misc_feature (134)..(134): n is a, c, g, or t
  misc_feature (143)..(143): n is a, c, g, or t
  misc_feature (154)..(154): n is a, c, g, or t
  misc_feature (172)..(172): n is a, c, g, or t
  misc_feature (177)..(177): n is a, c, g, or t
  misc_feature (182)..(182): n is a, c, g, or t
  misc_feature (203)..(203): n is a, c, g, or t
  misc_feature (205)..(205): n is a, c, g, or t
  misc_feature (396)..(396): n is a, c, g, or t

SEQ ID NO: 319 - DNA, 283 bp, Mus musculus
  misc_feature (45)..(45): n is a, c, g, or t
  misc_feature (83)..(83): n is a, c, g, or t
  misc_feature (97)..(97): n is a, c, g, or t
  misc_feature (151)..(151): n is a, c, g, or t
atatttttgtggattgccgccaatttggggggaaaggcgaagtcnttaagtagagtattcactgtttaatatttactattttnttaatatactgtantttggattttaattatcagcccagcttttcagaggcctgtgtaaagggttcccntcactggtggtgaatgtgtgatgttctgttgtgagctttgtgctgtatggggtgagcatcattatatattttatatgtgtacataaatagcaaagtggcaagaaattggtgttaagtccatcctgcataaat

SEQ ID NO: 320 - DNA, 283 bp, Mus musculus; identical to SEQ ID NO: 319
  misc_feature (45)..(45): n is a, c, g, or t
  misc_feature (83)..(83): n is a, c, g, or t
  misc_feature (97)..(97): n is a, c, g, or t
  misc_feature (151)..(151): n is a, c, g, or t

SEQ ID NO: 321 - DNA, 519 bp, Mus musculus
  misc_feature (65)..(65): n is a, c, g, or t
  misc_feature (101)..(101): n is a, c, g, or t
  misc_feature (106)..(106): n is a, c, g, or t
  misc_feature (124)..(124): n is a, c, g, or t
  misc_feature (128)..(128): n is a, c, g, or t
  misc_feature (138)..(138): n is a, c, g, or t
  misc_feature (163)..(164): n is a, c, g, or t
  misc_feature (174)..(174): n is a, c, g, or t
atagtgccctcagactggtctgcacagtccctcaactgaggctcccccttcccagttaagttagntcaagttagtcaattcaaagctagcagggacaaggnctggnaaacactttctgccctcnaggntctgatgtcngggttacgtagtaactttatccaanncatttggagntactcgctggcacacagtaatactcggtaaatgttagttgctacatcaagaaattttgtgataaatgggtagaaagatgttgaaatactcgtggtttctccatctgattgtttgattttgaaaacaaggctcgggggatggctcagcaggttaaggcccttgcctccgagcgggaagactgacccaagtttgatatccagcatccacatggtggaaggagagaactggttcctgtagattgtcctctgacctccacatgtgtgctgtggcacacagacacacacactttttaaagtccgtttttatcttgattgtgtatttcctaatgttggatacattgatcat

SEQ ID NO: 322 - DNA, 519 bp, Mus musculus; identical to SEQ ID NO: 321
  misc_feature (65)..(65): n is a, c, g, or t
  misc_feature (101)..(101): n is a, c, g, or t
  misc_feature (106)..(106): n is a, c, g, or t
  misc_feature (124)..(124): n is a, c, g, or t
  misc_feature (128)..(128): n is a, c, g, or t
  misc_feature (138)..(138): n is a, c, g, or t
  misc_feature (163)..(164): n is a, c, g, or t
  misc_feature (174)..(174): n is a, c, g, or t

SEQ ID NO: 323 - DNA, 553 bp, Mus musculus
  misc_feature (249)..(249): n is a, c, g, or t
  misc_feature (411)..(460): n is a, c, g, or t
gccctaattgggagtctttagtttgtgcaaaacgtgcatgcacctgtggtaaattgccatatactgtttaagcttaggtgggactctgggagtaaggagaccctccttgtttcctctaaaactccttgtcttggcagagttggtccctaatttgtaacaaggaggatgggaaacagcaagcacctaagagtagtcattactgtgctggactggggaggtggctcaggggtgaggaacacttgatgcccnttccctagggattgagttcgggtcccaggactccggactggcagcctggtagtccacaactgctaactcttgctccagggcatccaacatctccggattcctgaggcaacgtgcacatacacaccacccctgtatgagcagccatttaaaaaaaaaaagatnnnnnnnnnnnnnnnnnnnnnnnnnnnnnnnnnnnnnnnnnnnnnnnnnnttcaccatacagaccatgctggtcttaacctcagagatttatctgtccttgcctcccaagtgtctggattaagttgtttatcaccatgcctgc

SEQ ID NO: 324 - DNA, 553 bp, Mus musculus; identical to SEQ ID NO: 323
  misc_feature (249)..(249): n is a, c, g, or t
  misc_feature (411)..(460): n is a, c, g, or t

SEQ ID NO: 325 - DNA, 596 bp, Mus musculus
  misc_feature (62)..(82): n is a, c, g, or t
  misc_feature (307)..(307): n is a, c, g, or t
  misc_feature (367)..(367): n is a, c, g, or t
  misc_feature (488)..(488): n is a, c, g, or t
gaagcaacgttactattcagataccaaagtctgaccaatcattgcaccagtcgagctgacannnnnnnnnnnnnnnnnnnnngtaccaactattaaaaaataattcagtttaaaagggtgagatacatggtttttaaaaaaatgagttgccctactgtactgaaataggtttcaaccttattgatactgagagctttgcccataatccttttattactgaaatagtaactttagtacctttcatgataatataattttgaaagaaaatacacttaatttttaaacatgttatagccaattttcttangtctatttcttcatttactgatgagattgtcactatcgaatggtgtctgacaggcttgcnctttagcttctagagtgtctttgtccttgttttttgttgttttgttagcccatctagtatactaaagtgcatattcaaggctctctacagacacctcaaaatgatttaaatgcagttatcnaataagacatgtgaaggtgactctatcttgagaagtcagtgggtgactagcattgtgtagctattattcacattatcattgtgctgctggcatgcattaagtcatgat

SEQ ID NO: 326 - DNA, 596 bp, Mus musculus; identical to SEQ ID NO: 325
  misc_feature (62)..(82): n is a, c, g, or t
  misc_feature (307)..(307): n is a, c, g, or t
  misc_feature (367)..(367): n is a, c, g, or t
  misc_feature (488)..(488): n is a, c, g, or t

SEQ ID NO: 327 - DNA, 451 bp, Mus musculus
  misc_feature (147)..(152): n is a, c, g, or t
  misc_feature (154)..(162): n is a, c, g, or t
  misc_feature (164)..(165): n is a, c, g, or t
  misc_feature (167)..(168): n is a, c, g, or t
acatgtgtggcctggcacctactcttggtctgccaggccattggcaggactccgactgtgactcttaaaagatcagtttgggaagatagctgcatttagaagtggttcccctctgactagatcacaggtagggcaagctggtgcccnnnnnngnnnnnnnnntnncnnacctgcaaggccagtgatgcccagggctgcttgtccagctcagcggcagtactcccgctcaatgctcgccatgagctcctcttctgagtagtcataggagatggccgactgcccctcgggtctcttggggctgttccccggggcttcagaggcacagctgtcttcagggttgcctttaaccttcttctctggggacaccgcgggtgcgagccgggcggggcctcgtggggtcagctcctggggcccccaggcctccgactcggccagcaactgatccagcagg

SEQ ID NO: 328 - DNA, 451 bp, Mus musculus; identical to SEQ ID NO: 327
  misc_feature (147)..(152): n is a, c, g, or t
  misc_feature (154)..(162): n is a, c, g, or t
  misc_feature (164)..(165): n is a, c, g, or t
  misc_feature (167)..(168): n is a, c, g, or t

SEQ ID NO: 329 - DNA, 89 bp, Mus musculus
ggctgcttgtccagctcagcggcagtactcccgctcaatgctcgccatgagctcctcttctgagtagtcataggagatggccgactgcc

SEQ ID NO: 330 - DNA, 89 bp, Mus musculus; identical to SEQ ID NO: 329

SEQ ID NO: 331 - DNA, 283 bp, Mus musculus
  misc_feature (213)..(257): n is a, c, g, or t
gcaaagtacaggaggccaggaagtccttcttctcgggccacgcctccttctccatgttcactatgctgtatctggtgctctaccttcaggcccgcttcacctggcgcggggcccgactgctccgccccctcctgcagttcactttgctcatgatggccttctacacgggattgtcacgggtatctgactacaagcatcatcctagcgatgtcnnnnnnnnnnnnnnnnnnnnnnnnnnnnnnnnnnnnnnnnnnnnnttcttcgtgtccgacctcttcaagac

SEQ ID NO: 332 - DNA, 283 bp, Mus musculus; identical to SEQ ID NO: 331
  misc_feature (213)..(257): n is a, c, g, or t

SEQ ID NO: 333 - DNA, 349 bp, Mus musculus
  misc_feature (28)..(28): n is a, c, g, or t
  misc_feature (265)..(279): n is a, c, g, or t
  misc_feature (287)..(287): n is a, c, g, or t
  misc_feature (290)..(290): n is a, c, g, or t
ccaatcaggtagagtcattgcctgaggnaccaagttcttagttggatgtaagggaaaccaaggctcaggtggaagaggctcttgccagctgcagcaaacaagcccaaccctgctcacaccaggttcctcaggcaattctcctggtcctgtctcacctcctagcccccatctttagtctttcctgagaagagctcactttccccaggactggctaatgaaggggttcctggccccagctgctccctgaccctcggggatggagctnnnnnnnnnnnnnnnaacccaanatntaagagtattgttttgaagagacagccctgcaccgcatccctgcctcagaatttgcctt

SEQ ID NO: 334 - DNA, 349 bp, Mus musculus; identical to SEQ ID NO: 333
  misc_feature (28)..(28): n is a, c, g, or t
  misc_feature (265)..(279): n is a, c, g, or t
  misc_feature (287)..(287): n is a, c, g, or t
  misc_feature (290)..(290): n is a, c, g, or t

SEQ ID NO: 335 - DNA, 592 bp, Mus musculus
  misc_feature (26)..(28): n is a, c, g, or t
  misc_feature (33)..(36): n is a, c, g, or t
  misc_feature (93)..(93): n is a, c, g, or t
  misc_feature (137)..(137): n is a, c, g, or t
  misc_feature (144)..(144): n is a, c, g, or t
  misc_feature (148)..(148): n is a, c, g, or t
  misc_feature (151)..(152): n is a, c, g, or t
  misc_feature (161)..(161): n is a, c, g, or t
  misc_feature (186)..(186): n is a, c, g, or t
  misc_feature (188)..(188): n is a, c, g, or t
  misc_feature (191)..(191): n is a, c, g, or t
  misc_feature (194)..(195): n is a, c, g, or t
  misc_feature (199)..(199): n is a, c, g, or t
  misc_feature (201)..(202): n is a, c, g, or t
  misc_feature (207)..(207): n is a, c, g, or t
  misc_feature (217)..(217): n is a, c, g, or t
  misc_feature (219)..(219): n is a, c, g, or t
  misc_feature (221)..(221): n is a, c, g, or t
  misc_feature (223)..(224): n is a, c, g, or t
  misc_feature (230)..(230): n is a, c, g, or t
  misc_feature (237)..(237): n is a, c, g, or t
  misc_feature (240)..(240): n is a, c, g, or t
  misc_feature (299)..(299): n is a, c, g, or t
  misc_feature (301)..(301): n is a, c, g, or t
  misc_feature (352)..(352): n is a, c, g, or t
  misc_feature (397)..(397): n is a, c, g, or t
  misc_feature (451)..(452): n is a, c, g, or t
  misc_feature (454)..(500): n is a, c, g, or t
ttgtcgcagaggttttattactaccnnnggcannnnatagattctgagctggaatgcaatgacgtggtcctgttttggcgaatacagcgcatnctcgctatcactgccaatacattaaggcagcagcttacaaacantgaagtnaggngannagagaaaancgttaaagaggtattagaagatttngnagnagnnggtnannagaangttaaattgntnantnncaaacnagttcanctngcagaagatctcaagaaagttagagaaattcaagaaaagcttgatgctttcattgaagntnttcaccaggagaagtagactgtgtcaaaatcctgctcataatgtaatcacntctgcgtttatttgaagaatgaaaacttgagtcttttgtcctgcntcctttcctcccgttctacccttttccgtgcaaaataaagtcacagggtaaaanncnnnnnnnnnnnnnnnnnnnnnnnnnnnnnnnnnnnnnnnnnnnnnnnaagagccctggacgtggcatccacggtctgtgagctcgtgctgacggcagacattgggaaaacatcactggtgtggccgtgacgttagtcct

SEQ ID NO: 336 - DNA, 592 bp, Mus musculus; identical to SEQ ID NO: 335
  misc_feature (26)..(28): n is a, c, g, or t
  misc_feature (33)..(36): n is a, c, g, or t
  misc_feature (93)..(93): n is a, c, g, or t
  misc_feature (137)..(137): n is a, c, g, or t
  misc_feature (144)..(144): n is a, c, g, or t
  misc_feature (148)..(148): n is a, c, g, or t
  misc_feature (151)..(152): n is a, c, g, or t
  misc_feature (161)..(161): n is a, c, g, or t
  misc_feature (186)..(186): n is a, c, g, or t
  misc_feature (188)..(188): n is a, c, g, or t
  misc_feature (191)..(191): n is a, c, g, or t
  misc_feature (194)..(195): n is a, c, g, or t
  misc_feature (199)..(199): n is a, c, g, or t
  misc_feature (201)..(202): n is a, c, g, or t
  misc_feature (207)..(207): n is a, c, g, or t
  misc_feature (217)..(217): n is a, c, g, or t
  misc_feature (219)..(219): n is a, c, g, or t
  misc_feature (221)..(221): n is a, c, g, or t
  misc_feature (223)..(224): n is a, c, g, or t
  misc_feature (230)..(230): n is a, c, g, or t
  misc_feature (237)..(237): n is a, c, g, or t
  misc_feature (240)..(240): n is a, c, g, or t
  misc_feature (299)..(299): n is a, c, g, or t
  misc_feature (301)..(301): n is a, c, g, or t
  misc_feature (352)..(352): n is a, c, g, or t
  misc_feature (397)..(397): n is a, c, g, or t
  misc_feature (451)..(452): n is a, c, g, or t
  misc_feature (454)..(500): n is a, c, g, or t

SEQ ID NO: 337 - DNA, 137 bp, Mus musculus
  misc_feature (112)..(112): n is a, c, g, or t
gtgtgtgctagcaggctaaaaacagccatagctgtcttcatagggatatgtccatgaacgtatacttaggttaaacattattctggtagacagcgcaggtggttgttagcanggaccatactgtttgattacttgtt

SEQ ID NO: 338 - DNA, 137 bp, Mus musculus; identical to SEQ ID NO: 337
  misc_feature (112)..(112): n is a, c, g, or t

SEQ ID NO: 339 - DNA, 375 bp, Mus musculus
  misc_feature (208)..(208): n is a, c, g, or t
  misc_feature (263)..(263): n is a, c, g, or t
ctcgggacaggtgtggatacttagagaacctttgtctcaaagacggaaataaggagttcaattggcctaggagatagggacctagtagtccacgtctgtagtctcagactttgggaggtagaggcaggaacaacatgagttcaagatcagccttttctacatagaattgcaggccagcttgcgctgcctgagactgcggcttcacagnagggtgtgatgtaagggttgtaagtaagcctcttggattacactgagagaagcanagtctggagccattgagatgactcgggatgcagaactgctgctgcctgcttagtgttggggctcttggttggtctgtatttgctctttggctgtcggccttttccttagttt

SEQ ID NO: 340 - DNA, 375 bp, Mus musculus; identical to SEQ ID NO: 339
  misc_feature (208)..(208): n is a, c, g, or t
  misc_feature (263)..(263): n is a, c, g, or t

SEQ ID NO: 341 - DNA, 334 bp, Mus musculus
  misc_feature (138)..(138): n is a, c, g, or t
cttggcagagcgagcgactgtcagcctgctgacacgcatgggatttacttcttcccggtcctcctgagaagggaaagccggctatgcttgaacatccaggctcatgctggggtaactgaatctacctcagctgcgtcnctaagtgccagggggaaatctgacctctgccctgctggctatgctgacagtgctgaccacgggacctttgctgtgggctggtctgggttatgttcagtgactttgtaatccacagtaagagctctttagaaaccagctaggcttaggcaaactgttcagttccctactaggaaccatgttcccacgcgatccatga

SEQ ID NO: 342 - DNA, 334 bp, Mus musculus; identical to SEQ ID NO: 341
  misc_feature (138)..(138): n is a, c, g, or t

SEQ ID NO: 343 - DNA, 389 bp, Mus musculus
gactgagacatcaggagagactccctcaccttgctcctgtggaagcaaagcttccagctggatcagctttcccctcgatgacccacttttggagtcagcctcttatgagccacctactccgtggcactgataatgggcacaagtcacagtgctcaagtgcaagtgctatctatcacctgtgctctcttactgtttccttgtgttctgctgtcttcattttacttatgattgcctcttgagtttgcaatggaggaataagtagtgaactatcctcagtgcctgcacattctgcaagtagtcagcagttgttttaagtttgttcatgccatgcctgtctcggttccatgtgtgaaggcccaagaatacaatgaatagctagctcagcccta

SEQ ID NO: 344 - DNA, 389 bp, Mus musculus; identical to SEQ ID NO: 343

SEQ ID NO: 345 - DNA, 323 bp, Mus musculus
  misc_feature (129)..(129): n is a, c, g, or t
  misc_feature (170)..(170): n is a, c, g, or t
caactaaagacgtatctgcccacgtttgaaaccattatttgaatgaatggatgtataaagccatttgacaaaatggggacatttcctgtcaaaaaaaaaagttataaaataaaattttctatttttccntaacctttagagtcatactatacattttcattacaatctgncttattcatttctatagatattagaagacatttcatttaattttatttattcttctgccctcctccccttgtatatacacatatgtgtgctagtgcccaaggaggctggaagagggcgggcgcagagtcctatagagctggtgacatttgtca

SEQ ID NO: 346 - DNA, 323 bp, Mus musculus; identical to SEQ ID NO: 345
  misc_feature (129)..(129): n is a, c, g, or t
  misc_feature (170)..(170): n is a, c, g, or t

SEQ ID NO: 347 - DNA, 462 bp, Mus musculus
  misc_feature (189)..(227): n is a, c, g, or t
  misc_feature (257)..(257): n is a, c, g, or t
  misc_feature (263)..(263): n is a, c, g, or t
gaagaacatcagtgcctctggggcggaggctgtgtccacaggtagaaggctctcggtaatgctaggagcaagcaagagccacagaagggaccagaggtgaaagcaggtgggaggtcaccgcggcctgttatgtcatccgtcacagataaggactatgacagtacaaaacaaagctgatagcacagattnnnnnnnnnnnnnnnnnnnnnnnnnnnnnnnnnnnnnnnaccttcagcggtcttcccgggctcagagcncttagncccttaacatgcccccgagtcctggagcttcagttgatggtttctgtcccagtctatgaaatgcaaagcaatctagactcacccaggttggtttgatttagctacataacagtttatgcaattccacagtaatttttatcaaaataagagaattaaattttttctgtctatagatgtaggaacgtcagttttctgtgac

SEQ ID NO: 348 - DNA, 462 bp, Mus musculus; identical to SEQ ID NO: 347
  misc_feature (189)..(227): n is a, c, g, or t
  misc_feature (257)..(257): n is a, c, g, or t
  misc_feature (263)..(263): n is a, c, g, or t

SEQ ID NO: 349 - DNA, 390 bp, Mus musculus
atttgaaaggtcacaaactgtcatactctgcacttacaactggaacacctaatgctcctttcagctcttatctgcaaagctaggaactggaaatggttcagattacagaatttggggctgtttgcagtctttaattgtagaatgccccacggccaagaatcccaaaatcagaaatattcaaacttggagctttcttgagcctcatgagtatggtcagttttatagcagaaagcagcagtgtcctagttgaagtgagtgtgcaaaatccagaggatgaggcagggacacacctcttcccagttgtacatacccaagcacccagagattcataacgctcatacatgtatacagacacgtatactatacacacagaccacacatgatgctatg

SEQ ID NO: 350 - DNA, 390 bp, Mus musculus; identical to SEQ ID NO: 349

SEQ ID NO: 351 - DNA, 209 bp, Mus musculus
ggaacacctaatgctcctttcagctcttatctgcaaagctaggaactggaaatggttcagattacagaatttggggctgtttgcagtctttaattgtagaatgccccacggccaagaatcccaaaatcagaaatattcaaacttggagctttcttgagcctcatgagtatggtcagttttatagcagaaagcagcagtgtcctagttga

SEQ ID NO: 352 - DNA, 209 bp, Mus musculus; identical to SEQ ID NO: 351

SEQ ID NO: 353 - DNA, 480 bp, Mus musculus
  misc_feature (321)..(321): n is a, c, g, or t
  misc_feature (381)..(381): n is a, c, g, or t
  misc_feature (402)..(402): n is a, c, g, or t
  misc_feature (434)..(434): n is a, c, g, or t
  misc_feature (436)..(436): n is a, c, g, or t
aggatggtttttgctgactgctgtcatgttgggaggcaagcatcttattgactgacattggtgtgtgtggagcttgaaaacctcagtgggaggatctttctgtactcctgctcatcagtatctcttcctgttattaacaaggcgacttcttgtttaacctcagctttttttaaatgcttttttgcctattaggaaaaaaaaatcatatttagtagaggaaaattggccaaaataaagatgtaaaaatggtttaaaaatgtaattctgccacctaaatactatatgttttggtatagttcatatataggttttttttttttnaatgtattcattggcttttgtttgtctttaaatgacactgggataattctgagcatagtntctgatattatggtcagctantaacatcagatgtttttcatgttattaaatantnttctgtaacattttaatagctgttgatatttccactgatagata

SEQ ID NO: 354 - DNA, 480 bp, Mus musculus; identical to SEQ ID NO: 353
  misc_feature (321)..(321): n is a, c, g, or t
  misc_feature (381)..(381): n is a, c, g, or t
  misc_feature (402)..(402): n is a, c, g, or t
  misc_feature (434)..(434): n is a, c, g, or t
  misc_feature (436)..(436): n is a, c, g, or t

SEQ ID NO: 355 - DNA, 338 bp, Mus musculus
  misc_feature (214)..(214): n is a, c, g, or t
  misc_feature (245)..(245): n is a, c, g, or t
tccatcttgacactgagagactcaagacattttttccaacatagcatcatctgtggcaattgcttggcaatttaaagggctcccaggaactgcatggaacagtcttaggacatgcaatcaaacccatcagactctgggcaagctccaccagaagagaggctgcctgcccctcgccgattgctttaacccaagttaaaaccaagcttgggatccnatgcttgctgagatgattgacggctgtcatnaggagaaactacatctgggaaatttctcgccaggatctactgatctcacgtcgatggaatatggagaacaaatgttggtttggtttgccaagc

SEQ ID NO: 356 - DNA, 338 bp, Mus musculus; identical to SEQ ID NO: 355
  misc_feature (214)..(214): n is a, c, g, or t
  misc_feature (245)..(245): n is a, c, g, or t

SEQ ID NO: 357 - DNA, 259 bp, Mus musculus
  misc_feature (98)..(116): n is a, c, g, or t
  misc_feature (229)..(229): n is a, c, g, or t
  misc_feature (234)..(234): n is a, c, g, or t
tctgctcttgattgttcccaaatcctatttacaaaactttattgtcatggttttggctttttacttgaggaaaatattctaactggtctctttccttnnnnnnnnnnnnnnnnnnntgtgaactagaaccgtgggtagaggccgggtaccctggggtttgtggagaaggtgtcactgtgccccttctttgtactacacagcccagagcaccatcttaaacctcagtatnaacanaagggcatttctcaaaatgaatttg

SEQ ID NO: 358 - DNA, 259 bp, Mus musculus; identical to SEQ ID NO: 357
  misc_feature (98)..(116): n is a, c, g, or t
  misc_feature (229)..(229): n is a, c, g, or t
  misc_feature (234)..(234): n is a, c, g, or t

SEQ ID NO: 359 - DNA, 583 bp, Mus musculus
  misc_feature (40)..(40): n is a, c, g, or t
  misc_feature (301)..(315): n is a, c, g, or t
  misc_feature (325)..(325): n is a, c, g, or t
  misc_feature (333)..(338): n is a, c, g, or t
  misc_feature (340)..(340): n is a, c, g, or t
  misc_feature (354)..(354): n is a, c, g, or t
  misc_feature (357)..(358): n is a, c, g, or t
  misc_feature (360)..(361): n is a, c, g, or t
  misc_feature (363)..(363): n is a, c, g, or t
  misc_feature (365)..(365): n is a, c, g, or t
  misc_feature (367)..(370): n is a, c, g, or t
  misc_feature (373)..(373): n is a, c, g, or t
  misc_feature (375)..(375): n is a, c, g, or t
  misc_feature (377)..(377): n is a, c, g, or t
  misc_feature (383)..(383): n is a, c, g, or t
  misc_feature (385)..(385): n is a, c, g, or t
  misc_feature (396)..(396): n is a, c, g, or t
  misc_feature (400)..(400): n is a, c, g, or t
  misc_feature (414)..(414): n is a, c, g, or t
  misc_feature (418)..(418): n is a, c, g, or t
  misc_feature (423)..(423): n is a, c, g, or t
  misc_feature (429)..(429): n is a, c, g, or t
  misc_feature (431)..(431): n is a, c, g, or t
  misc_feature (435)..(439): n is a, c, g, or t
  misc_feature (442)..(442): n is a, c, g, or t
  misc_feature (445)..(445): n is a, c, g, or t
  misc_feature (451)..(451): n is a, c, g, or t
  misc_feature (459)..(459): n is a, c, g, or t
  misc_feature (462)..(462): n is a, c, g, or t
  misc_feature (477)..(477): n is a, c, g, or t
  misc_feature (534)..(548): n is a, c, g, or t
tgaggaggccactttcttgccacaggatgatgaaaaaagngtgagcttttgtgatcctctccatcaggactgagcctcctggatcctctttctcctttaggggggagtaagtttgggaaagagtgactggagcctctgtggggatctccaggacaaaatcaatagtggggcctttgtgagctggacatgggtgtgcatattccgggttttgttcttggagggctctggacaccaaggacaagacatattccatggaaacaggaagagcccagcttgatgcggttggaccatctctggcagnnnnnnnnnnnnnnnagtaggaaanggggttgnnnnnntnggggatggagaaancanntnntntnannnnagntntncatatntnaggccagaaantttnacacagctactttntccnccagnccattntnaaannnnncanttngagctncaggaggnttntgggagacaacaaantcaaccacagcatgggacagatagcagcagaggcagcttttcctcacccccaccccnnnnnnnnnnnnnnnttttttttttttaaatgatcttgttactcactgtg

SEQ ID NO: 360 - DNA, 583 bp, Mus musculus; identical to SEQ ID NO: 359
  misc_feature (40)..(40): n is a, c, g, or t
  misc_feature (301)..(315): n is a, c, g, or t
  misc_feature (325)..(325): n is a, c, g, or t
  misc_feature (333)..(338): n is a, c, g, or t
  misc_feature (340)..(340): n is a, c, g, or t
  misc_feature (354)..(354): n is a, c, g, or t
  misc_feature (357)..(358): n is a, c, g, or t
  misc_feature (360)..(361): n is a, c, g, or t
  misc_feature (363)..(363): n is a, c, g, or t
  misc_feature (365)..(365): n is a, c, g, or t
  misc_feature (367)..(370): n is a, c, g, or t
  misc_feature (373)..(373): n is a, c, g, or t
  misc_feature (375)..(375): n is a, c, g, or t
  misc_feature (377)..(377): n is a, c, g, or t
  misc_feature (383)..(383): n is a, c, g, or t
  misc_feature (385)..(385): n is a, c, g, or t
  misc_feature (396)..(396): n is a, c, g, or t
  misc_feature (400)..(400): n is a, c, g, or t
  misc_feature (414)..(414): n is a, c, g, or t
  misc_feature (418)..(418): n is a, c, g, or t
  misc_feature (423)..(423): n is a, c, g, or t
  misc_feature (429)..(429): n is a, c, g, or t
  misc_feature (431)..(431): n is a, c, g, or t
  misc_feature (435)..(439): n is a, c, g, or t
  misc_feature (442)..(442): n is a, c, g, or t
  misc_feature (445)..(445): n is a, c, g, or t
  misc_feature (451)..(451): n is a, c, g, or t
  misc_feature (459)..(459): n is a, c, g, or t
  misc_feature (462)..(462): n is a, c, g, or t
  misc_feature (477)..(477): n is a, c, g, or t
  misc_feature (534)..(548): n is a, c, g, or t

SEQ ID NO: 361 - DNA, 218 bp, Mus musculus
  misc_feature (53)..(53): n is a, c, g, or t
  misc_feature (55)..(55): n is a, c, g, or t
  misc_feature (159)..(160): n is a, c, g, or t
ccccctttagtaatgtaattcatgggatttggacttcagttatggagtaggcntntgatagggggagattgattgaaactgtactttctgttgctgaagtaaagtttttgatttttgggtcaataatttgacttaccaaataaatgtttattataatannaaagaggagagaaaaagggcgacccgctaggagttccagctgatgatcgcggcaagag

SEQ ID NO: 362 - DNA, 218 bp, Mus musculus; identical to SEQ ID NO: 361
  misc_feature (53)..(53): n is a, c, g, or t
  misc_feature (55)..(55): n is a, c, g, or t
  misc_feature (159)..(160): n is a, c, g, or t

SEQ ID NO: 363 - DNA, 439 bp, Mus musculus
  misc_feature (28)..(42): n is a, c, g, or t
  misc_feature (287)..(287): n is a, c, g, or t
  misc_feature (314)..(314): n is a, c, g, or t
  misc_feature (414)..(414): n is a, c, g, or t
ggtctgttcatctgtcttccttatgttnnnnnnnnnnnnnnngtgtcatcaccatgagaatgaactgtcctggcaaccacgtcccagacaaataacaacatgccctaaaaaccccaaacacagtgtgcagcttaatcagctcacccgctcacagggtatctggtaccttaactcctgccgggtctgagtattgtaaatactcaaagtaattgttgaatcagttcggttgacctgggagtatattctgggggaagcgcttaaagatgccaggtggctacctgaatttntgagtactgtaatgatcccagcatttntcaattgtgtgaaacaacattcatgagtttgaaaccaatgagtcaggtacttactgtagcaggagtggcagactggccaagcaggacccctaccctgttntcttttccagtgcaaaagggccatt

SEQ ID NO: 364 - DNA, 439 bp, Mus musculus; identical to SEQ ID NO: 363
  misc_feature (28)..(42): n is a, c, g, or t
  misc_feature (287)..(287): n is a, c, g, or t
  misc_feature (314)..(314): n is a, c, g, or t
  misc_feature (414)..(414): n is a, c, g, or t

SEQ ID NO: 365 - DNA, 169 bp, Mus musculus
  misc_feature (33)..(33): n is a, c, g, or t
  misc_feature (81)..(81): n is a, c, g, or t
  misc_feature (137)..(137): n is a, c, g, or t
aggtggccccaagttctaccattagccaccggnagatctttgagtagagcttagggggtcagggctgggccaggggcctantgtagcttctaggcatccttacagagacactggggtttgtactggattgtgtgatntgggcaggtgtttaattgctcactaatcactg

SEQ ID NO: 366 - DNA, 169 bp, Mus musculus; identical to SEQ ID NO: 365
  misc_feature (33)..(33): n is a, c, g, or t
  misc_feature (81)..(81): n is a, c, g, or t
  misc_feature (137)..(137): n is a, c, g, or t

SEQ ID NO: 367 - DNA, 361 bp, Mus musculus
  misc_feature (142)..(147): n is a, c, g, or t
  misc_feature (149)..(152): n is a, c, g, or t
  misc_feature (154)..(155): n is a, c, g, or t
ccttaagatcattggcgcctaaaaaataattttaaaacttcctataaggacatgcagcaaaacgtaatgacaatgagactttctctccaggctatgtgtttaagaagcaggcccagtgctaaaagaacaaaacaaaacaaannnnnnannnngnnggatacactctaggttaaagaatgcccccccccaaatcattaaacaaaatggtatttaaaatatttttgaataaaaggtaatatttttaaaataaaaggtattattaattttcaggatgaatagaacatgctagttttaggtctttttaaatagttcactaagtacagttctctttactcaggttcttggcatccatcaagatttt

SEQ ID NO: 368 - DNA, 361 bp, Mus musculus; identical to SEQ ID NO: 367
  misc_feature (142)..(147): n is a, c, g, or t
  misc_feature (149)..(152): n is a, c, g, or t
  misc_feature (154)..(155): n is a, c, g, or t

SEQ ID NO: 369 - DNA, 408 bp, Mus musculus
ctggtgtggttcttgcagtgacaagaagggtgtattttatagtctcctctgcagaagattaggatcgagaccaagacctgaccaagaggtcacttccagggctggccatacaccaagcactatagttcatcttcttacatgatggaagtgatccccatcacaaaacagtgtctagagaactgtctctccaccctaggctctgttcctttgacagaactacacataactgctctagtacaggctagaagacaaccagtattcagtaatattctacactttgccaagctagcagcaagaagctaatcatgctttctgctaacgagagagaatgaagtccttggtgagatgagcggttaataagatgagtgcaagtcacttttctccttccactgtggttccagggattgg

SEQ ID NO: 370 - DNA, 408 bp, Mus musculus; identical to SEQ ID NO: 369

SEQ ID NO: 371 - DNA, 497 bp, Mus musculus
ctgagggcagcatgtgaagtttcttaggtatgctaatctctagcatttttaagatctttctgccctttcctgctgtaaatctggatacgtgtattaagaaataatcacaccacagcctgtgtgctatgctattgacatttcctccacagcacaattcagtccattgttcttgagctctaggctcactcaaaatatcaggacacgagaacagcacagccagattctttgacagatacaacacaaatatcccccagtctagttcccaagagaattcgtggtcctttctacaacatcattagttgggtctcctatgttcacgtttttctcacaagggctcattaaccttgacttctggcactacagtgcttatctatccaagccgttcaagttttcctatattcccccaccaacagcctacaagccacattgatgaggtttagtatatatagcactgccccctacttctcaataccagttttctctactagttacagaag

SEQ ID NO: 372 - DNA, 497 bp, Mus musculus; identical to SEQ ID NO: 371

SEQ ID NO: 373 - DNA, 501 bp, Mus musculus
  misc_feature (26)..(26): n is a, c, g, or t
  misc_feature (180)..(180): n is a, c, g, or t
aggcattctgcaaaaatacagtcacnaaaagcacctgcagcgtgtgcttttgcagaggggtggcagtggcaggcaagagcacactgccagtgattgctgtgtggcctttcttcctaaaaccaatgcttcggaaatgtgtatttttctgtaacttgcaaaattaaaagttgcctatctgcngacacgccctcctgcctctctgccctatgttatcagtatcttaaacctgcaccctgcaggcttaaatcccagataaactcaaggaagtcctgctgcctccctgcctccctctctccctagggtttccaggcaggtagctgggacatcatttgcaaccagccagggaccctattgccctcagactctccacagtgccagtaagacctacagaactggggaggaaatccccattaagattatttaagtctatttatattgtaataaaataaatgtaaaaaaaaaagatttaaatgaaggcagattcagatctttctgacatcg

SEQ ID NO: 374 - DNA, 501 bp, Mus musculus; identical to SEQ ID NO: 373
  misc_feature (26)..(26): n is a, c, g, or t
  misc_feature (180)..(180): n is a, c, g, or t

SEQ ID NO: 375 - DNA, 411 bp, Mus musculus
  misc_feature (26)..(26): n is a, c, g, or t
  misc_feature (35)..(49): n is a, c, g, or t
  misc_feature (51)..(51): n is a, c, g, or t
  misc_feature (69)..(85): n is a, c, g, or t
  misc_feature (314)..(314): n is a, c, g, or t
ccagacgccagaagtgtgcccctttnttgtcaatnnnnnnnnnnnnnnnancggagatgattttttttnnnnnnnnnnnnnnnnnactcgtgtcactgagccaagtgtgcatggtcgttagctactttgtgggttcttctttcttctaccctacttcttccctttccaccccctaacactagataggagagaggagagagaaaggaaagtgggcactgttatattgttggacgacttcttgctgattaaggggtgtcgagttccttggagcaatgatctttgctgccaagatatctcatttcttcttgtttctntcttcgcccacgaccacttcacaaacaccgaccaacagcaaacaacaacccaccccgcttctcgggggccctagcacttatgtacttctgaaaagtc

SEQ ID NO: 376 - DNA, 411 bp, Mus musculus; identical to SEQ ID NO: 375
  misc_feature (26)..(26): n is a, c, g, or t
  misc_feature (35)..(49): n is a, c, g, or t
  misc_feature (51)..(51): n is a, c, g, or t
  misc_feature (69)..(85): n is a, c, g, or t
  misc_feature (314)..(314): n is a, c, g, or t

SEQ ID NO: 377 - DNA, 457 bp, Mus musculus
  misc_feature (35)..(35): n is a, c, g, or t
  misc_feature (226)..(247): n is a, c, g, or t
gcaatacgacgaagggtgaacttcagttaaagctngatgaacttcaagcttctgatgttgctgtgaagtatcgagaaaaacgcttagaacaagaaaaggaattgctacacaatcaaaattcatggctgaacacagagttgaaaaccaaaactgatgagctgttggctctaggaagagaaaaaggaaatgaaattctggaacttaagtgtaatcttgaaaacaaaannnnnnnnnnnnnnnnnnnnnnagaacagatgaatggcttgaaaacatcaaatgaacatcttcagaaacatgtagaggatttgttgacaaaattaaaagaggccaaagaacagcaggccagtatggaagagaaattccacaatgagttaaatgctcacataaagctctctaatctctacaagagcgctgctgatgactcagaggcaaagagtaatgagctaacccgggcagt

SEQ ID NO: 378 - DNA, 457 bp, Mus musculus; identical to SEQ ID NO: 377
  misc_feature (35)..(35): n is a, c, g, or t
  misc_feature (226)..(247): n is a, c, g, or t

SEQ ID NO: 379 - DNA, 302 bp, Mus musculus
  misc_feature (31)..(34): n is a, c, g, or t
  misc_feature (68)..(68): n is a, c, g, or t
  misc_feature (181)..(181): n is a, c, g, or t
  misc_feature (259)..(274): n is a, c, g, or t
  misc_feature (277)..(277): n is a, c, g, or t
gtgctatggatgagccctatgatacacgctnnnncaagtggatgatcaaaaacaaggggctgtcagcnatccctgtctccaccttctatagccagccccatcataaggactttgaccactacatccgattctgttttgtgaaggacaaggctacactccaggccatggataagaggctgtncagctggaaaggagagccccaagcctgaggcgctcaggcccgcctccaaccccgagacctcagctgtgccttatcacnnnnnnnnnnnnnnnnggncccagatgtgtgactgggcatgttt

SEQ ID NO: 380 - DNA, 302 bp, Mus musculus; identical to SEQ ID NO: 379
  misc_feature (31)..(34): n is a, c, g, or t
  misc_feature (68)..(68): n is a, c, g, or t
  misc_feature (181)..(181): n is a, c, g, or t
  misc_feature (259)..(274): n is a, c, g, or t
  misc_feature (277)..(277): n is a, c, g, or t

SEQ ID NO: 381 - DNA, 488 bp, Mus musculus
  misc_feature (153)..(168): n is a, c, g, or t
  misc_feature (350)..(350): n is a, c, g, or t
  misc_feature (354)..(354): n is a, c, g, or t
  misc_feature (367)..(367): n is a, c, g, or t
  misc_feature (387)..(387): n is a, c, g, or t
ctgatcctcagattgagccagtactccaaaaacttgccacctcaaacttgttcagtattgataaaagacaacatggagagagtgagctctagcacatgtcaaaactgtatcttttcctacttgaaatttttaaactgtaaatgagaatggtannnnnnnnnnnnnnnngaaaaaaagatgaggttttggttctcagagaaaaagaaagtgagccttcctcatacagcacaagcccactcccaagtcaaaggaaagtgaggagctgaaggtgccaaagaccagtgcagcaagcaggggaacctctgttacactcatgcagtaaaggcgccatcttggttccctgggaatgntccnaaggagacaagantccccccacctacccagtgntctgcattgtccacgtgatcctagagcagtagagagaaggcccaggtgtgagcaggacatgttcacacaaagatcttaagactgtcacttgactgtcctca

SEQ ID NO: 382 - DNA, 488 bp, Mus musculus; identical to SEQ ID NO: 381
  misc_feature (153)..(168): n is a, c, g, or t
  misc_feature (350)..(350): n is a, c, g, or t
  misc_feature (354)..(354): n is a, c, g, or t
  misc_feature (367)..(367): n is a, c, g, or t
  misc_feature (387)..(387): n is a, c, g, or t

SEQ ID NO: 383 - DNA, 384 bp, Mus musculus
  misc_feature (136)..(136): n is a, c, g, or t
  misc_feature (188)..(188): n is a, c, g, or t
  misc_feature (191)..(191): n is a, c, g, or t
  misc_feature (200)..(200): n is a, c, g, or t
  misc_feature (203)..(205): n is a, c, g, or t
  misc_feature (207)..(207): n is a, c, g, or t
  misc_feature (209)..(209): n is a, c, g, or t
  misc_feature (211)..(211): n is a, c, g, or t
  misc_feature (213)..(214): n is a, c, g, or t
  misc_feature (216)..(216): n is a, c, g, or t
  misc_feature (218)..(223): n is a, c, g, or t
  misc_feature (226)..(233): n is a, c, g, or t
  misc_feature (236)..(236): n is a, c, g, or t
  misc_feature (238)..(238): n is a, c, g, or t
  misc_feature (240)..(240): n is a, c, g, or t
  misc_feature (247)..(247): n is a, c, g, or t
  misc_feature (253)..(253): n is a, c, g, or t
  misc_feature (261)..(261): n is a, c, g, or t
  misc_feature (265)..(265): n is a, c, g, or t
  misc_feature (268)..(270): n is a, c, g, or t
  misc_feature (277)..(277): n is a, c, g, or t
  misc_feature (281)..(281): n is a, c, g, or t
  misc_feature (283)..(283): n is a, c, g, or t
  misc_feature (286)..(286): n is a, c, g, or t
  misc_feature (296)..(296): n is a, c, g, or t
  misc_feature (304)..(304): n is a, c, g, or t
  misc_feature (314)..(314): n is a, c, g, or t
  misc_feature (347)..(347): n is a, c, g, or t
  misc_feature (350)..(350): n is a, c, g, or t
  misc_feature (353)..(353): n is a, c, g, or t
acctgtggacagtccgatgttctgggcaacactgggagcgagaggccagtgtccgcttccagcacgtgggcacctctgtgttcctgtcggtcactggtgaacagtatggtaaccccatccgtgggcagcatgaggntcatggcatgcctagtgccaatgctcacaacacgtggaaggcaatggaaggnatnttcatcaanccnnngngnananntntnnnnnngtnnnnnnnnaantntnagaaccngatgantgatgggnaggntgnnngagtggnaatntnggngtcatttttntgtaagantttgtttgtnggggccctcaagtgcctttatgattaaagaatnttngtntgggattatttttgctgtaaccctggggaag

SEQ ID NO: 384 - DNA, 384 bp, Mus musculus; identical to SEQ ID NO: 383
  misc_feature (136)..(136): n is a, c, g, or t
  misc_feature (188)..(188): n is a, c, g, or t
  misc_feature (191)..(191): n is a, c, g, or t
  misc_feature (200)..(200): n is a, c, g, or t
  misc_feature (203)..(205): n is a, c, g, or t
  misc_feature (207)..(207): n is a, c, g, or t
  misc_feature (209)..(209): n is a, c, g, or t
  misc_feature (211)..(211): n is a, c, g, or t
  misc_feature (213)..(214): n is a, c, g, or t
  misc_feature (216)..(216): n is a, c, g, or t
  misc_feature (218)..(223): n is a, c, g, or t
  misc_feature (226)..(233): n is a, c, g, or t
  misc_feature (236)..(236): n is a, c, g, or t
  misc_feature (238)..(238): n is a, c, g, or t
  misc_feature (240)..(240): n is a, c, g, or t
  misc_feature (247)..(247): n is a, c, g, or t
  misc_feature (253)..(253): n is a, c, g, or t
  misc_feature (261)..(261): n is a, c, g, or t
  misc_feature (265)..(265): n is a, c, g, or t
  misc_feature (268)..(270): n is a, c, g, or t
  misc_feature (277)..(277): n is a, c, g, or t
  misc_feature (281)..(281): n is a, c, g, or t
  misc_feature (283)..(283): n is a, c, g, or t
  misc_feature (286)..(286): n is a, c, g, or t
  misc_feature (296)..(296): n is a, c, g, or t
  misc_feature (304)..(304): n is a, c, g, or t
  misc_feature (314)..(314): n is a, c, g, or t
  misc_feature (347)..(347): n is a, c, g, or t
  misc_feature (350)..(350): n is a, c, g, or t
  misc_feature (353)..(353): n is a, c, g, or t

SEQ ID NO: 385 - DNA, 517 bp, Mus musculus
  misc_feature (106)..(106): n is a, c, g, or t
  misc_feature (410)..(411): n is a, c, g, or t
  misc_feature (413)..(413): n is a, c, g, or t
  misc_feature (418)..(418): n is a, c, g, or t
  misc_feature (420)..(420): n is a, c, g, or t
  misc_feature (422)..(425): n is a, c, g, or t
  misc_feature (428)..(430): n is a, c, g, or t
  misc_feature (438)..(438): n is a, c, g, or t
ctgtattctgaaccatttagggtttttcccttatctttccttctctgaactctggcatacatatttgtacactgtaatgtcattgtaactgtttaattgccttggnaatgctaatgtatcgtaacacttagttgagaaaagcatgaccgggtcatatgttgtttgacttaagggtaacatagaataagtgtttctccagtctgccagacaaagcttggtagtgggaggggactctgacctctcccttttgtgtttgtctataggaattgattgggaaacttttgttttgtgttttttgtttgtttgtttgaagtgtaaactgatactcttttataagaagtaaatacaaacattattgggtgcctttgtttgtaaaccaaaaagtaataaatgaatccctatatttctannanaaaananannnnaannntacattgnggagaacatccatgaggttaaatggctacgatggcaaaaggagtcctgggagctgtttcctttcctagggggcatcatc

SEQ ID NO: 386 - DNA, 517 bp, Mus musculus; identical to SEQ ID NO: 385
  misc_feature (106)..(106): n is a, c, g, or t
  misc_feature (410)..(411): n is a, c, g, or t
  misc_feature (413)..(413): n is a, c, g, or t
  misc_feature (418)..(418): n is a, c, g, or t
  misc_feature (420)..(420): n is a, c, g, or t
  misc_feature (422)..(425): n is a, c, g, or t
  misc_feature (428)..(430): n is a, c, g, or t
  misc_feature (438)..(438): n is a, c, g, or t

SEQ ID NO: 387 - DNA, 605 bp, Mus musculus
  misc_feature (32)..(32): n is a, c, g, or t
  misc_feature (100)..(126): n is a, c, g, or t
  misc_feature (180)..(280): n is a, c, g, or t
  misc_feature (298)..(328): n is a, c, g, or t
  misc_feature (374)..(374): n is a, c, g, or t
  misc_feature (489)..(503): n is a, c, g, or t
ttttctggcacaaagttttaaagcagtgctgngtatcctgtacatttgttttgcagtttgttgctctgtattttacagtgctctccccaccccactcacnnnnnnnnnnnnnnnnnnnnnnnnnnnttctcctaaatccactataatttgctttcctagacaacactaaatctgccctgnnnnnnnnnnnnnnnnnnnnnnnnnnnnnnnnnnnnnnnnnnnnnnnnnnnnnnnnnnnnnnnnnnnnnnnnnnnnnnnnnnnnnnnnnnnnnnnnnnnnncggggccacgtgtggtgnnnnnnnnnnnnnnnnnnnnnnnnnnnnnnnaccaaatgctgagttgctgattctagatgtaattagttcactttangtaatattctccttttctctaaactgactttaaaagcaaagttttatcatttccattgtatttattacagaatgttttagccttgatattctttgtaatttcactcatttgttannnnnnnnnnnnnnntaacatctgtataaatggtttttaaaaattaactatgtacgtatgtatgtatgtgcccatgccgaagctgagcaataaaatgaatgctgtttgcactgtcac

SEQ ID NO: 388 - DNA, 605 bp, Mus musculus; identical to SEQ ID NO: 387
  misc_feature (32)..(32): n is a, c, g, or t
  misc_feature (100)..(126): n is a, c, g, or t
  misc_feature (180)..(280): n is a, c, g, or t
  misc_feature (298)..(328): n is a, c, g, or t
  misc_feature (374)..(374): n is a, c, g, or t
  misc_feature (489)..(503): n is a, c, g, or t

SEQ ID NO: 389 - DNA, 147 bp, Mus musculus
  misc_feature (49)..(63): n is a, c, g, or t
acagaatgttttagccttgatattctttgtaatttcactcatttgttannnnnnnnnnnnnnntaacatctgtataaatggtttttaaaaattaactatgtacgtatgtatgtatgtgcccatgccgaagctgagcaataaaatgaa

SEQ ID NO: 390 - DNA, 147 bp, Mus musculus; identical to SEQ ID NO: 389
  misc_feature (49)..(63): n is a, c, g, or t

SEQ ID NO: 391 - DNA, 549 bp, Mus musculus
  misc_feature (265)..(265): n is a, c, g, or t
  misc_feature (283)..(283): n is a, c, g, or t
  misc_feature (285)..(285): n is a, c, g, or t
  misc_feature (494)..(494): n is a, c, g, or t
  misc_feature (497)..(514): n is a, c, g, or t
tgtcctagcctgtccttctgactgagacatgataccggatagtcttaactccagaaccccacccccaacacttctccatcagtaacctgcacttcctttgtctattggttatgactctaactcctcagacttaagggatggccttcttgtcccgtcctagaactggagtacctatgtcccaagccctgcgttggaagctcccatttcagttcctcactccccagagcctgataaactgagacctggtgcctgccttcctgtgagntcccccagagctaaactncnttgattcctgccccatggaacaacttgagagctcgggttggctcagtcccacaatgaagagtggccccggagcctgagcagtgagaaagagaactgtccagcagagaagagacctcttttgtaccccaggcttctactcttacctcttctctagcatactcaggaacgcccttccatccccatacaagaacacaagctcatgttacatnttnnnnnnnnnnnnnnnnnntgtgtttccccacggccccataactgtccaaaggt

SEQ ID NO: 392 - DNA, 549 bp, Mus musculus; identical to SEQ ID NO: 391
  misc_feature (265)..(265): n is a, c, g, or t
  misc_feature (283)..(283): n is a, c, g, or t
  misc_feature (285)..(285): n is a, c, g, or t
  misc_feature (494)..(494): n is a, c, g, or t
  misc_feature (497)..(514): n is a, c, g, or t

SEQ ID NO: 393 - DNA, 438 bp, Mus musculus
  misc_feature (60)..(60): n is a, c, g, or t
  misc_feature (64)..(64): n is a, c, g, or t
  misc_feature (69)..(69): n is a, c, g, or t
  misc_feature (71)..(71): n is a, c, g, or t
  misc_feature (74)..(76): n is a, c, g, or t
  misc_feature (78)..(78): n is a, c, g, or t
  misc_feature (85)..(86): n is a, c, g, or t
  misc_feature (92)..(93): n is a, c, g, or t
  misc_feature (102)..(104): n is a, c, g, or t
  misc_feature (107)..(107): n is a, c, g, or t
  misc_feature (115)..(115): n is a, c, g, or t
  misc_feature (127)..(127): n is a, c, g, or t
  misc_feature (131)..(131): n is a, c, g, or t
  misc_feature (135)..(135): n is a, c, g, or t
  misc_feature (143)..(143): n is a, c, g, or t
  misc_feature (147)..(147): n is a, c, g, or t
  misc_feature (149)..(149): n is a, c, g, or t
  misc_feature (156)..(156): n is a, c, g, or t
  misc_feature (161)..(161): n is a, c, g, or t
  misc_feature (168)..(168): n is a, c, g, or t
  misc_feature (171)..(171): n is a, c, g, or t
  misc_feature (184)..(184): n is a, c, g, or t
  misc_feature (195)..(195): n is a, c, g, or t
  misc_feature (205)..(205): n is a, c, g, or t
  misc_feature (207)..(207): n is a, c, g, or t
  misc_feature (209)..(209): n is a, c, g, or t
  misc_feature (214)..(243): n is a, c, g, or t
  misc_feature (245)..(294): n is a, c, g, or t
  misc_feature (307)..(307): n is a, c, g, or t
  misc_feature (322)..(322): n is a, c, g, or t
  misc_feature (324)..(372): n is a, c, g, or t
taaaattgtgctcttaaatcaaatttgggtattatattttaatatgtaatttgttaatangtanccacngngtnnngnctggagnnttaagnnttacagttnnntcnccagtttncagtctcagctngaanctgncctttagncacnangaatatnggttnccaattnggnttggctgaaattngctgctgacangtcgagtttngncntcttnnnnnnnnnnnnnnnnnnnnnnnnnnnnnncnnnnnnnnnnnnnnnnnnnnnnnnnnnnnnnnnnnnnnnnnnnnnnnnnntcagagctgactntagaaggtgaggttntnnnnnnnnnnnnnnnnnnnnnnnnnnnnnnnnnnnnnnnnnnnnnnnnnttttagtagtatttaaataaactccatgtttcttttgggcctaacatgccttttgaagtctgtata

SEQ ID NO: 394 - DNA, 438 bp, Mus musculus; identical to SEQ ID NO: 393
  misc_feature (60)..(60): n is a, c, g, or t
  misc_feature (64)..(64): n is a, c, g, or t
  misc_feature (69)..(69): n is a, c, g, or t
  misc_feature (71)..(71): n is a, c, g, or t
  misc_feature (74)..(76): n is a, c, g, or t
  misc_feature (78)..(78): n is a, c, g, or t
  misc_feature (85)..(86): n is a, c, g, or t
  misc_feature (92)..(93): n is a, c, g, or t
  misc_feature (102)..(104): n is a, c, g, or t
  misc_feature (107)..(107): n is a, c, g, or t
  misc_feature (115)..(115): n is a, c, g, or t
  misc_feature (127)..(127): n is a, c, g, or t
  misc_feature (131)..(131): n is a, c, g, or t
  misc_feature (135)..(135): n is a, c, g, or t
  misc_feature (143)..(143): n is a, c, g, or t
  misc_feature (147)..(147): n is a, c, g, or t
  misc_feature (149)..(149): n is a, c, g, or t
  misc_feature (156)..(156): n is a, c, g, or t
  misc_feature (161)..(161): n is a, c, g, or t
  misc_feature (168)..(168): n is a, c, g, or t
  misc_feature (171)..(171): n is a, c, g, or t
  misc_feature (184)..(184): n is a, c, g, or t
  misc_feature (195)..(195): n is a, c, g, or t
  misc_feature (205)..(205): n is a, c, g, or t
  misc_feature (207)..(207): n is a, c, g, or t
  misc_feature (209)..(209): n is a, c, g, or t
  misc_feature (214)..(243): n is a, c, g, or t
  misc_feature (245)..(294): n is a, c, g, or t
  misc_feature (307)..(307): n is a, c, g, or t
  misc_feature (322)..(322): n is a, c, g, or t
  misc_feature (324)..(372): n is a, c, g, or t

SEQ ID NO: 395 - DNA, 611 bp, Mus musculus
  misc_feature (157)..(175): n is a, c, g, or t
  misc_feature (203)..(284): n is a, c, g, or t
  misc_feature (304)..(304): n is a, c, g, or t
  misc_feature (374)..(389): n is a, c, g, or t
tgagctttattgcagtcttaacatatattaaccgtagatccacctagctgttttatttaactcttaattcccaggggcttggttttaaaagtgggtctactcttagtagagtgggcatgattacattgacaagccacactccataattaggttattnnnnnnnnnnnnnnnnnnngtagagtagtttcaatgcaaatacagtnnnnnnnnnnnnnnnnnnnnnnnnnnnnnnnnnnnnnnnnnnnnnnnnnnnnnnnnnnnnnnnnnnnnnnnnnnnnnnnnnntaatttaaaactttaattanaaaaattttgttccattgcagtaaaagtgggtggcatgtattttttggctaagggtgctgttccctggtnnnnnnnnnnnnnnnnttatacttgaccctcaagcagtttcctccctgcagtgattattgcttctgacacggtaagtctgttacttatcactggtttatgggcagttgtgtttaaaaaactagtagttttgctttctttggttaaatatggtatgaatgtcaattttttttcctataccagatccttcattttgtttacagtgtttcttacttagacctaggaccataaccaaatctg

SEQ ID NO: 396 - DNA, 611 bp, Mus musculus; identical to SEQ ID NO: 395
  misc_feature (157)..(175): n is a, c, g, or t
  misc_feature (203)..(284): n is a, c, g, or t
  misc_feature (304)..(304): n is a, c, g, or t
  misc_feature (374)..(389): n is a, c, g, or t

SEQ ID NO: 397 - DNA, 213 bp, Mus musculus
  misc_feature (64)..(82): n is a, c, g, or t
ctccaaatttctggatgtgtcatatgcctcagcactacagaatctgactctctctttgagtatnnnnnnnnnnnnnnnnnnngcacagggctgtttaacagatggctccaatccctgctccatacttgggagcctttggttccatctttataccaaatgccaatcacactggctacagagagtgtattatagtctgtgtctaagcttagaagc

SEQ ID NO: 398 - DNA, 213 bp, Mus musculus; identical to SEQ ID NO: 397
  misc_feature (64)..(82): n is a, c, g, or t

SEQ ID NO: 399 - DNA, 384 bp, Mus musculus
gaacgttcccaaatcgggcaatattccccactctgcctggttggtgaagggactgacagataaccagtgaacttcagtgtctccacgtttagcggtagagacctcaccgactccccaaggcaacctgcgcaccgaaaccagatcattccttaagccgcacacctttccagtgtcaaaagcagtgcgaatacaagcttggcctttcacggtgcagatttaagggcctccaaactttcctgtgcctttgtttctaacctcagttagttagtgggtgccacgctaatggcgtcatagttacatcagtgccgggtccgctggaggtcatgggctttgtggttgttgtttctcttttggtaacaatgttggaatgcatctctctctctc

SEQ ID NO: 400 - DNA, 384 bp, Mus musculus; identical to SEQ ID NO: 399

SEQ ID NO: 401 - DNA, 431 bp, Mus musculus
tcactgatggatggtagtttctcaattttggcctctgtggctgcctggtcatttcctgttgcaactgttaagggggagcctgttcgaggcggagtggctggtacagtttttggaggcagaggtggaggtgttccagtggggaaaggtcttgctagctctggcgactccgtacttgggttcatcggttggcctgaaccccatatctcaggctgatctaaaagaacttccgtcttctgctcatcaaaagctgactctaatggtggaccaaagaggggagcaagggccagagtgtcatccagaggcttcttgcttgtaagttctggagttggggtggaacgcctgggtcttgcaacttcttcactggataagttccttttaattgcacccgggctgcgcctcggacttttcctcacaggcgaaggggaaagtgc

SEQ ID NO: 402 - DNA, 431 bp, Mus musculus; identical to SEQ ID NO: 401

SEQ ID NO: 403 - DNA, 305 bp, Mus musculus
  misc_feature (90)..(90): n is a, c, g, or t
  misc_feature (139)..(139): n is a, c, g, or t
aacacagtggaaaccatgatttatctgagaagtcattttccaaagcagatggctctgcagccttggcaggattcccctgggtctcctttnatctacgtcctcccaggcccactgtttgaagtaaaagaaaccaggaccnctcagagacagatgggcctgtgttcagagagtcaaaatgagtctggaatagcctcttgtaaccagaaagtcaggattttatttaaaaacttgttagaggcagtagctgaggaccaaaggacccaacttaagggtctttgtgggtgatgttgcgactgttcaagcac

SEQ ID NO: 404 - DNA, 305 bp, Mus musculus; identical to SEQ ID NO: 403
  misc_feature (90)..(90): n is a, c, g, or t
  misc_feature (139)..(139): n is a, c, g, or t

SEQ ID NO: 405 - DNA, 531 bp, Mus musculus
  misc_feature (340)..(505): n is a, c, g, or t
gtccagtccatctgagcccagggaccaatccttacctggtggtgttcgtggcagtagagtagccatgtgtgccaccatgcctggccttaggcagagttgttcattagaatggggctgaggagaaaggactaacactgatttgaggagctggggctgccactcacagggagtgtgagaggggtgtggggtcccgttgttatgagggtggtttcagagaacacaatacagatcagtggccaggttatccctatgacataggacattgacctgtatctggtggggtctccctattgataaaataagggtggaagacgggcttatttcatttgttgaaagtgannnnnnnnnnnnnnnnnnnnnnnnnnnnnnnnnnnnnnnnnnnnnnnnnnnnnnnnnnnnnnnnnnnnnnnnnnnnnnnnnnnnnnnnnnnnnnnnnnnnnnnnnnnnnnnnnnnnnnnnnnnnnnnnnnnnnnnnnnnnnnnnnnnnnnnnnnnnnnnnnnnnnnggccggagcaagcagggccagaaaat

SEQ ID NO: 406 - DNA, 531 bp, Mus musculus; identical to SEQ ID NO: 405
  misc_feature (340)..(505): n is a, c, g, or t

SEQ ID NO: 407 - DNA, 394 bp, Mus musculus
  misc_feature (169)..(170): n is a, c, g, or t
caacctctgtactgtcccttggagggtggaggagcctatgacatgatgccagagccagagttagggacgagtgaccggaatggggagttttcccatatgtgggattagactaaattcagtgtgatttctctttgccctttcaaaccttattcaggttgggactcatttnnttctggtggatcacagctacccagatgtgtagattgatctctatgttctatagagaaatccttttctttcatcttcagcagggtttttatttcatttttattttgccaccaaaagaaaacattggagcatacgtcccctcttgattgtgactttccagtgttgaccgttcagttctttgtgttgtaggtcccagcccaccagtactatatcaaacactgttagg

SEQ ID NO: 408 - DNA, 394 bp, Mus musculus; identical to SEQ ID NO: 407
  misc_feature (169)..(170): n is a, c, g, or t

SEQ ID NO: 409 - DNA, 462 bp, Mus musculus
  misc_feature (368)..(369): n is a, c, g, or t
  misc_feature (372)..(372): n is a, c, g, or t
  misc_feature (375)..(375): n is a, c, g, or t
  misc_feature (377)..(377): n is a, c, g, or t
  misc_feature (379)..(380): n is a, c, g, or t
  misc_feature (388)..(388): n is a, c, g, or t
  misc_feature (390)..(402): n is a, c, g, or t
  misc_feature (405)..(405): n is a, c, g, or t
  misc_feature (407)..(408): n is a, c, g, or t
  misc_feature (410)..(410): n is a, c, g, or t
  misc_feature (412)..(413): n is a, c, g, or t
  misc_feature (416)..(428): n is a, c, g, or t
  misc_feature (431)..(433): n is a, c, g, or t
  misc_feature (435)..(436): n is a, c, g, or t
tgatagtgcaaaacccagaatggatgtcctctttatagccctccttgttgcaccactcatcctgggacaggaatacgaccatgaagagcagctggaagagggtgattactatcaagtggcatattattattacacagtgacccctaattatgatgacttcagtgtaaacttcactgttgattactccgtgtttgagtcagaggataggttgaacaggttgaataaggaggtaacaacaacagaagcggtagagactacagcctcttcatacagtcttcatacagaacttatggaccctcagaatcctgtaaccacgaaaccagtgaccacagaaccagtgaccacagaaccagtgaccacagaaccanngantcnanannagaatgangnnnnnnnnnnnnngantnntntnnccnnnnnnnnnnnnnggnnncnngacctgcaggaaacaaggcaggtttt

SEQ ID NO: 410 - DNA, 462 bp, Mus musculus; identical to SEQ ID NO: 409
  misc_feature (368)..(369): n is a, c, g, or t
  misc_feature (372)..(372): n is a, c, g, or t
  misc_feature (375)..(375): n is a, c, g, or t
  misc_feature (377)..(377): n is a, c, g, or t
  misc_feature (379)..(380): n is a, c, g, or t
  misc_feature (388)..(388): n is a, c, g, or t
  misc_feature (390)..(402): n is a, c, g, or t
  misc_feature (405)..(405): n is a, c, g, or t
  misc_feature (407)..(408): n is a, c, g, or t
  misc_feature (410)..(410): n is a, c, g, or t
  misc_feature (412)..(413): n is a, c, g, or t
  misc_feature (416)..(428): n is a, c, g, or t
  misc_feature (431)..(433): n is a, c, g, or t
  misc_feature (435)..(436): n is a, c, g, or t

SEQ ID NO: 411 - DNA, 486 bp, Mus musculus
  misc_feature (147)..(156): n is a, c, g, or t
  misc_feature (158)..(159): n is a, c, g, or t
  misc_feature (161)..(163): n is a, c, g, or t
  misc_feature (165)..(165): n is a, c, g, or t
  misc_feature (168)..(169): n is a, c, g, or t
  misc_feature (174)..(174): n is a, c, g, or t
  misc_feature (189)..(268): n is a, c, g, or t
  misc_feature (307)..(374): n is a, c, g, or t
ggtccagaaatcaaaaccacctcagaaatccaaaaacagaaagaagggctcggctctggatccagaaccacaagtaaaactggaagatgttctcccgttggcttttactcggctctgtgaacctaaagaagcttcctacagtctcannnnnnnnnncnngnnncngtnntaccntaagctcagagtggnnnnnnnnnnnnnnnnnnnnnnnnnnnnnnnnnnnnnnnnnnnnnnnnnnnnnnnnnnnnnnnnnnnnnnnnnnnnnnnngcttcggggacatttcagctgaagaaatcaggggagaannnnnnnnnnnnnnnnnnnnnnnnnnnnnnnnnnnnnnnnnnnnnnnnnnnnnnnnnnnnnnnnnnnngacctgctccaccactgctctgaagaagtatgtcctggagaaccacccaggggccaactctaactatcagatgcatttgctgaaaaaaaccctgcagaaatgtgagaagaac

SEQ ID NO: 412 - DNA, 486 bp, Mus musculus; identical to SEQ ID NO: 411
  misc_feature (147)..(156): n is a, c, g, or t
  misc_feature (158)..(159): n is a, c, g, or t
  misc_feature (161)..(163): n is a, c, g, or t
  misc_feature (165)..(165): n is a, c, g, or t
  misc_feature (168)..(169): n is a, c, g, or t
  misc_feature (174)..(174): n is a, c, g, or t
  misc_feature (189)..(268): n is a, c, g, or t
  misc_feature (307)..(374): n is a, c, g, or t

SEQ ID NO: 413 - DNA, 289 bp, Mus musculus
  misc_feature (99)..(113): n is a, c, g, or t
ggtgtctctcaaagtctggctaagaattaactcaaagcgtccaaagtcaaaagctctcaggggttttcctgggactcggtggggtttgctgcaaggtgnnnnnnnnnnnnnnnagcatgctgtgtggtcacatcgtcgcctgtgtgggacttttggttctgagagcctggttcttccagcctgcaaacttggttcctgctgcagactgctcttcttcgcttttcctggttattctcttgtgtccagcagcagggcccacaccccactgcaaccgagtttaagagcttag

SEQ ID NO: 414 - DNA, 289 bp, Mus musculus; identical to SEQ ID NO: 413
  misc_feature (99)..(113): n is a, c, g, or t

SEQ ID NO: 415 - DNA, 561 bp, Mus musculus
  misc_feature (32)..(32): n is a, c, g, or t
  misc_feature (61)..(61): n is a, c, g, or t
  misc_feature (105)..(105): n is a, c, g, or t
  misc_feature (314)..(314): n is a, c, g, or t
  misc_feature (336)..(337): n is a, c, g, or t
  misc_feature (348)..(348): n is a, c, g, or t
  misc_feature (350)..(350): n is a, c, g, or t
  misc_feature (530)..(530): n is a, c, g, or t
  misc_feature (536)..(536): n is a, c, g, or t
ggcttagttgttcagccttttgcacattaccnacaatgctgtctacccagttcagtgtgtntaagccagtacccacaacactcagtcctatactggctgcttttntactcctcctgtccccatgccccattgtggcttcccaaagcattaaagctctctctgtcctgccttggtgtgactgaggtgactgctaccttacatgtcatcatttattcagtggcacaaggtgagccctgcttgagtttagccaccaatcttgttttatttttattttctgaaaaagcacgaaatgttgagaccattagtatcagganttgagcatttatgtgctttganntcctgaaacantnttagaattatagtatgataaaacaaaggactttaataacaagctgttttgccataattaagatgaatagaaactagtttaattttcacagtactatatcattttatttttgaaggcagttaggagtggatcctctttttcctgcatatcatgtttttaaaaacaaaacagaaaaattctntactgntctttacttttccatgggatctaga

SEQ ID NO: 416 - DNA, 561 bp, Mus musculus; identical to SEQ ID NO: 415
  misc_feature (32)..(32): n is a, c, g, or t
  misc_feature (61)..(61): n is a, c, g, or t
  misc_feature (105)..(105): n is a, c, g, or t
  misc_feature (314)..(314): n is a, c, g, or t
  misc_feature (336)..(337): n is a, c, g, or t
  misc_feature (348)..(348): n is a, c, g, or t
  misc_feature (350)..(350): n is a, c, g, or t
  misc_feature (530)..(530): n is a, c, g, or t
  misc_feature (536)..(536): n is a, c, g, or t

SEQ ID NO: 417 - DNA, 549 bp, Mus musculus
  misc_feature (54)..(54): n is a, c, g, or t
ttcctcagaaagaagacagaatttgcaaaagagacaagacaataagcacttaanctctactcagtctcacagaagtgacccaaattccgagtctttatattttgaggatgaagatgggtttcaagaactaagtgagaatggaaattctaaagatgagaatattcaacagaaactttcttcaaaagtattggatgacttacctgagaactcacccatcaatatagttcagactccgattcccatcaccacctcagttcctaagcgagccaagagtcagaagaaaaaagcgttagctgcagcccttgctacagcacaggaatactcagaaataagtatggagcaaaaaaagttgcaggaagctctatcaaaagcagctggaaaaaagactaaaacccctgtgcagctggacctaggggacatgctagctgctctggagaagcagcagcaggcaatgaaggcacgccagatcaccaacaccaggccgctggcacatccagttgtcaccacagccactttccacactaaagactctaacagaaagaccttagc

SEQ ID NO: 418 - DNA, 549 bp, Mus musculus; identical to SEQ ID NO: 417
  misc_feature (54)..(54): n is a, c, g, or t

SEQ ID NO: 419 - DNA, 565 bp, Mus musculus
  misc_feature (94)..(94): n is a, c, g, or t
  misc_feature (100)..(100): n is a, c, g, or t
  misc_feature (278)..(280): n is a, c, g, or t
  misc_feature (354)..(354): n is a, c, g, or t
tcctgaccagatggttgtgtatgggtagcactactcaagtttagaacttgcggtgtctttcagaatttttaaaataaactgtaaactaataggntgggtnttttgtttgtttgttttatgttttagttactgaagccttagcaggttatgtagagagataccatcttctgtaccaaaaatagacaagagaatgctgttgatactggtgttctgtaatgtgaacttatgctggtgaaaacaactttatgttccccttattaaaacttagtgtccttttnnnacttgtgactttctgcatcaccccatcaatttaaggaaaaaaagtatgtatatatgtgtaagtagagagagagngtgagagagagagagtgactataacttgaaaacaagattaagacatttttctttgtaaaatgtccggcgacagtgtaagactcttgtttttctttcccacggcagccatcagcatctgaggccctcacctgccaggtgtattacagcttgcatagcactctcgagtgtcaccactctcgctggaggtcttgtgctgcttccagaagtgaca

SEQ ID NO: 420 - DNA, 565 bp, Mus musculus; identical to SEQ ID NO: 419
  misc_feature (94)..(94): n is a, c, g, or t
  misc_feature (100)..(100): n is a, c, g, or t
  misc_feature (278)..(280): n is a, c, g, or t
  misc_feature (354)..(354): n is a, c, g, or t

SEQ ID NO: 421 - DNA, 286 bp, Mus musculus
  misc_feature (56)..(56): n is a, c, g, or t
  misc_feature (106)..(106): n is a, c, g, or t
  misc_feature (117)..(117): n is a, c, g, or t
  misc_feature (125)..(125): n is a, c, g, or t
  misc_feature (131)..(131): n is a, c, g, or t
  misc_feature (140)..(141): n is a, c, g, or t
  misc_feature (144)..(144): n is a, c, g, or t
  misc_feature (146)..(147): n is a, c, g, or t
  misc_feature (169)..(169): n is a, c, g, or t
  misc_feature (171)..(171): n is a, c, g, or t
  misc_feature (173)..(173): n is a, c, g, or t
  misc_feature (177)..(177): n is a, c, g, or t
  misc_feature (182)..(182): n is a, c, g, or t
  misc_feature (184)..(184): n is a, c, g, or t
  misc_feature (189)..(189): n is a, c, g, or t
  misc_feature (258)..(258): n is a, c, g, or t
ttcaactatttatgagatgtatctctcgctctctcttatttgtacttgtgtgtgtngtgtgtgtgtgtgtgtgtgtgtgtgtgtgtgtgtgtatgaaatctgtgtntccaatctctntctcccanatcggngacagtcannagntnntcctgagaagatatttaatttngntnacantcagntntgccntcccttgtccccaccacacattcctttgaaataaggtttcaatatacatttacatactatatatatatntggcaacttgtgtttgtatataaatata

SEQ ID NO: 422 - DNA, 286 bp, Mus musculus; identical to SEQ ID NO: 421
  misc_feature (56)..(56): n is a, c, g, or t
  misc_feature (106)..(106): n is a, c, g, or t
  misc_feature (117)..(117): n is a, c, g, or t
  misc_feature (125)..(125): n is a, c, g, or t
  misc_feature (131)..(131): n is a, c, g, or t
  misc_feature (140)..(141): n is a, c, g, or t
  misc_feature (144)..(144): n is a, c, g, or t
  misc_feature (146)..(147): n is a, c, g, or t
  misc_feature (169)..(169): n is a, c, g, or t
  misc_feature (171)..(171): n is a, c, g, or t
  misc_feature (173)..(173): n is a, c, g, or t
  misc_feature (177)..(177): n is a, c, g, or t
  misc_feature (182)..(182): n is a, c, g, or t
  misc_feature (184)..(184): n is a, c, g, or t
  misc_feature (189)..(189): n is a, c, g, or t
  misc_feature (258)..(258): n is a, c, g, or t

SEQ ID NO: 423 - DNA, 308 bp, Mus musculus
ggtgctctctatagccgatctgcttttcagtctattaaagtgtttggtttgctgtgtttgatcctgatgtacacagtgtgattggtggtgtgagtttaagctttctgggtggtttgttgcatggcaggcacctctgctctctgcatgtctgcagctttactgaggtgcacacacacacacacacacacacacacacacacacacacactgcccgagaggatttggagtgggagggctgcccttcctcactgtgtcttgtgaattcatgtctatttctgcagtcacttctgaatcacttgcactgtttg

SEQ ID NO: 424 - DNA, 308 bp, Mus musculus; identical to SEQ ID NO: 423

SEQ ID NO: 425 - DNA, 384 bp, Mus musculus
  misc_feature (26)..(40): n is a, c, g, or t
  misc_feature (245)..(245): n is a, c, g, or t
  misc_feature (286)..(286): n is a, c, g, or t
ccaggttgctcagtgctctgcaggannnnnnnnnnnnnnngagaggctgggaataatgggcaggaagaattgtcaagccaggagacagtcctgtacacacccacacccttcaggcagtgtgacctgaagcaagtccctttctctagctaggcaagacagaatcattagacagcctagtctctcttcagatcaaagtctccatagttgtgtggagtccgtgagtggccgggcatgctctgctgccntaaggcacagagagcctaacttttctttcctctgagtgtanccccttggtctgagcccctctcccattcctgccaccagagaggggcctggcctctccccacagggcttctctcctcttcaaggccatatccatatgtg

SEQ ID NO: 426 - DNA, 384 bp, Mus musculus; identical to SEQ ID NO: 425
  misc_feature (26)..(40): n is a, c, g, or t
  misc_feature (245)..(245): n is a, c, g, or t
  misc_feature (286)..(286): n is a, c, g, or t

SEQ ID NO: 427 - DNA, 387 bp, Mus musculus
  misc_feature (229)..(243): n is a, c, g, or t
  misc_feature (291)..(316): n is a, c, g, or t
gagcaagcggaactgactttcctgattaaatttcacttgtcttttccatctcttggattttgatctctcaatgcaacttactttctctctttctctccctcccttccttccttcctttcttccttcttcctttcttctttctttctttttttctttctttctttctttctttctttctttctttcaaaaatatgcttatttttatgagtttgagtgttttgcctgcccnnnnnnnnnnnnnnnccgtgtgtgtgcctggtaccgacagaagccaaatgagtatgtcagagnnnnnnnnnnnnnnnnnnnnnnnnnnattgtgagccatcccgtgggtgttggaaacaaacccaggtcctctgcagaggcagcaagtgctctgaacca

SEQ ID NO: 428 - DNA, 388 bp, Mus musculus
  misc_feature (230)..(244): n is a, c, g, or t
  misc_feature (292)..(317): n is a, c, g, or t
agagcaagcggaactgactttcctgattaaatttcacttgtcttttccatctcttggattttgatctctcaatgcaacttactttctctctttctctccctcccttccttccttcctttcttccttcttcctttcttctttctttctttttttctttctttctttctttctttctttctttctttcaaaaatatgcttatttttatgagtttgagtgttttgcctgcccnnnnnnnnnnnnnnnccgtgtgtgtgcctggtaccgacagaagccaaatgagtatgtcagagnnnnnnnnnnnnnnnnnnnnnnnnnnattgtgagccatcccgtgggtgttggaaacaaacccaggtcctctgcagaggcagcaagtgctctgaacca

SEQ ID NO: 429 - DNA, 375 bp, Mus musculus
  misc_feature (182)..(196): n is a, c, g, or t
  misc_feature (244)..(269): n is a, c, g, or t
atctcttggattttgatctctcaatgcaacttactttctctctttctctccctcccttccttccttcctttcttccttcttcctttcttctttctttctttttttctttctttctttctttctttctttctttctttcaaaaatatgcttatttttatgagtttgagtgttttgcctgcccnnnnnnnnnnnnnnnccgtgtgtgtgcctggtaccgacagaagccaaatgagtatgtcagagnnnnnnnnnnnnnnnnnnnnnnnnnnattgtgagccatcccgtgggtgttggaaacaaacccaggtcctctgcagaggcagcaagtgctctgaaccaccaagtcctctctccagccccataaaaaatggctt

SEQ ID NO: 430 - DNA, 375 bp, Mus musculus; identical to SEQ ID NO: 429
  misc_feature (182)..(196): n is a, c, g, or t
  misc_feature (244)..(269): n is a, c, g, or t

SEQ ID NO: 431 - DNA, 485 bp, Mus musculus
  misc_feature (109)..(110): n is a, c, g, or t
  misc_feature (120)..(120): n is a, c, g, or t
  misc_feature (148)..(148): n is a, c, g, or t
  misc_feature (249)..(249): n is a, c, g, or t
  misc_feature (305)..(305): n is a, c, g, or t
  misc_feature (307)..(307): n is a, c, g, or t
  misc_feature (318)..(318): n is a, c, g, or t
  misc_feature (349)..(349): n is a, c, g, or t
  misc_feature (437)..(438): n is a, c, g, or t
ctgcttgtgctgatggtgtgactaggtgtatcgaatctgcttccgtttaacctcagacgttatcacacagcctaacgactcacattgagctctcagtcatgaactgcannccacttttanttacaaagaggctagagcatgtcagtgncatgatgcttgccaagccagccctaggcatctaagataattacggtattttagtatgcggtgtactgccataggaccagaggtcagtaacagtgttctttntttcttgcttcaggtttatgtatatctgttaaagataacgtgcatgaattactttntntcaattatttntcaccctattaaacacaagagattgcacagngatttctgtccccttaatgaaagcgcctccttctgttctcctcttcccctcctttccacctccctcctcccaggtaaccccccaaacnnccgttttttttcctgttgtagatttgttaatgctgcagaaagggctc

SEQ ID NO: 432 - DNA, 485 bp, Mus musculus; identical to SEQ ID NO: 431
  misc_feature (109)..(110): n is a, c, g, or t
  misc_feature (120)..(120): n is a, c, g, or t
  misc_feature (148)..(148): n is a, c, g, or t
  misc_feature (249)..(249): n is a, c, g, or t
  misc_feature (305)..(305): n is a, c, g, or t
  misc_feature (307)..(307): n is a, c, g, or t
  misc_feature (318)..(318): n is a, c, g, or t
  misc_feature (349)..(349): n is a, c, g, or t
  misc_feature (437)..(438): n is a, c, g, or t

SEQ ID NO: 433 - DNA, 465 bp, Mus musculus
  misc_feature (31)..(31): n is a, c, g, or t
  misc_feature (45)..(45): n is a, c, g, or t
  misc_feature (254)..(254): n is a, c, g, or t
ctctggggaagcagccagaaagtatagcttntaccattgagctcnatgcactgtgtgtgaaactggaaagaaaaccaatgtataagcccgtggaccctcactctcggatgcagtccacctacagctatggcatgcgtggaggtgcctatccccccagatacttttacccatttccagtcccacctttactctaccaagttgagctctccgtgggcggacagcagtttaatgggaaaggaaagatgagaccaccngtgaaacacgatgcccctgcccgtgcgctgaggactctgcagagtgaacccctgccagaaaggttggaggtaaatggaagagaagcagaggaagaaaacctcaataaatcggaaataagccaagtgtttgagattgcgctgaagcggaatttgcctgtgaattttgaggtggcccgggagagtggcccaccacacatgaagaactttgtga

SEQ ID NO: 434 - DNA, 465 bp, Mus musculus; identical to SEQ ID NO: 433
  misc_feature (31)..(31): n is a, c, g, or t
  misc_feature (45)..(45): n is a, c, g, or t
  misc_feature (254)..(254): n is a, c, g, or t

SEQ ID NO: 435 - DNA, 227 bp, Mus musculus
cccagtatatgtgacttatgtcaaaacagcagttttaataactggatacaagacctttatatggatgcagaaaatgttggcacgcgctgacccagaacactgcagaagtacaaaaccaaatttggaaaaatggaatggttttagttttatatttggtttgtgatttttaaatctctctctctatatatatatatcactgtttctcactgttccttggacaaataatg

SEQ ID NO: 436 - DNA, 227 bp, Mus musculus; identical to SEQ ID NO: 435

SEQ ID NO: 437 - DNA, 398 bp, Mus musculus
  misc_feature (185)..(185): n is a, c, g, or t
  misc_feature (191)..(192): n is a, c, g, or t
  misc_feature (198)..(198): n is a, c, g, or t
  misc_feature (204)..(204): n is a, c, g, or t
  misc_feature (207)..(207): n is a, c, g, or t
  misc_feature (212)..(212): n is a, c, g, or t
  misc_feature (217)..(217): n is a, c, g, or t
  misc_feature (222)..(222): n is a, c, g, or t
  misc_feature (248)..(248): n is a, c, g, or t
gaaagaccctaggatggaaaactgaccctcacctccgagaaaaatggtgcccttccttctaagccactaaactctggagccctgcctccccagtcacctggcctcatttatcctgctgctctagatttgtccttctgtatcccgcatgagtaatgcagccattggagaacacacagcctcctggnaagaanngactgnctaccntcnacatngaagntactngagtaagctgatttccacctagtgtntgaacaagaagagacagagcaaatggaacaattcaaatggccacagaagagactgtgccgacatctgatgtactgtagaaatcattatcaactggagagccaaatactggtagtgtccaaaagaacaggaaaacaagtccttttcagaga

SEQ ID NO: 438 - DNA, 398 bp, Mus musculus; identical to SEQ ID NO: 437
  misc_feature (185)..(185): n is a, c, g, or t
  misc_feature (191)..(192): n is a, c, g, or t
  misc_feature (198)..(198): n is a, c, g, or t
  misc_feature (204)..(204): n is a, c, g, or t
  misc_feature (207)..(207): n is a, c, g, or t
  misc_feature (212)..(212): n is a, c, g, or t
  misc_feature (217)..(217): n is a, c, g, or t
  misc_feature (222)..(222): n is a, c, g, or t
  misc_feature (248)..(248): n is a, c, g, or t

SEQ ID NO: 439 - DNA, 513 bp, Mus musculus
  misc_feature (108)..(108): n is a, c, g, or t
  misc_feature (156)..(177): n is a, c, g, or t
  misc_feature (259)..(301): n is a, c, g, or t
  misc_feature (357)..(372): n is a, c, g, or t
ctggaatttccttgccctgccacaagaagcaaatcccttccttcctcaggccgggagggtcgtcaccaagccctcctctgacctgtgcgggttcctgggcaccagccntcaggagtcattgttccttccttcccgctccccctggcttgttctttnnnnnnnnnnnnnnnnnnnnnncttggccctgacaaatcaggccactgcactgggcgacctctaaaggccctcctttgtttggcctctgtgaccacagcccaannnnnnnnnnnnnnnnnnnnnnnnnnnnnnnnnnnnnnnnnnngagttaggcagccttacctgagcagccagccactccttccaaacagctgtatgcannnnnnnnnnnnnnnnatgtagcgtcacatcttggagaggagctggagtatttgtgtggggaagactagggtgggaggtgtccagctacatagccacagcaggggacagggactggaggtggggtggggtggggcatcatctgtgctgggtgcagac

SEQ ID NO: 440 - DNA, 513 bp, Mus musculus; identical to SEQ ID NO: 439
  misc_feature (108)..(108): n is a, c, g, or t
  misc_feature (156)..(177): n is a, c, g, or t
  misc_feature (259)..(301): n is a, c, g, or t
  misc_feature (357)..(372): n is a, c, g, or t

SEQ ID NO: 441 - DNA, 434 bp, Mus musculus
  misc_feature (215)..(242): n is a, c, g, or t
  misc_feature (327)..(327): n is a, c, g, or t
gtttctacgaaacagaatctcagccatcccattccttacccctcacaatcagttcttaactatataaacttttggtttgatagcattatcgatttgagatcagttgaaattgctttacttttttatttctgtgactaaattgcctgaacacctcattgtatttgaaaaccataacagctttgaaatgccacggggcctgataatctgccagggannnnnnnnnnnnnnnnnnnnnnnnnnnngcccttggtgcagctgatcctgacatgggagaacgaccatgtttttctttgtgtgtgcttctagcagctgttttggagaaccatnacccagtagtgttccctgtgctatttctagtgaaatggtcttagctatgtagcagcttttgattccctgcatcccctaggctgctgcttgcattctgtccttattta

SEQ ID NO: 442 - DNA, 434 bp, Mus musculus; identical to SEQ ID NO: 441
  misc_feature (215)..(242): n is a, c, g, or t
  misc_feature (327)..(327): n is a, c, g, or t

SEQ ID NO: 443 - DNA, 517 bp, Mus musculus
  misc_feature (73)..(74): n is a, c, g, or t
  misc_feature (82)..(82): n is a, c, g, or t
  misc_feature (117)..(117): n is a, c, g, or t
  misc_feature (136)..(136): n is a, c, g, or t
  misc_feature (145)..(145): n is a, c, g, or t
  misc_feature (175)..(175): n is a, c, g, or t
  misc_feature (276)..(276): n is a, c, g, or t
  misc_feature (288)..(288): n is a, c, g, or t
gtgcaattagtcactgcccctttacagccatgtatttaaaatattttgtcaactagttattaattcaaaagtnnaggtattntaaaattttaaaactttaacttcttaaaagacaanaaagagagaaattgtatcnccgtgcatnctatttagtgcattcccatgcacactattnaagtcttacctttattttcaaaatctaatattttaatgtcaaagagtttaataaatgctttatagtatcttaaagggatctacttattggcttatagattnatcctaaaacanctaccttattagaaaagggaaaaacaggttttctccacaaaacgcttcaaaaacatattaattcgtgtgacgagctggtaggtaagttgactcatgtcctgattgtattgactaaaaaactaaattaaattcatgttttagatccatccttacttgtcatttttccagtttagactagcttctagccttttaactttatggcaatagtacatcagagactgtatattca

SEQ ID NO: 444 - DNA, 517 bp, Mus musculus; identical to SEQ ID NO: 443
  misc_feature (73)..(74): n is a, c, g, or t
  misc_feature (82)..(82): n is a, c, g, or t
  misc_feature (117)..(117): n is a, c, g, or t
  misc_feature (136)..(136): n is a, c, g, or t
  misc_feature (145)..(145): n is a, c, g, or t
  misc_feature (175)..(175): n is a, c, g, or t
  misc_feature (276)..(276): n is a, c, g, or t
  misc_feature (288)..(288): n is a, c, g, or t

SEQ ID NO: 445 - DNA, 297 bp, Mus musculus
  misc_feature (36)..(36): n is a, c, g, or t
  misc_feature (67)..(67): n is a, c, g, or t
  misc_feature (85)..(106): n is a, c, g, or t
  misc_feature (133)..(133): n is a, c, g, or t
  misc_feature (202)..(216): n is a, c, g, or t
tctgccgccgataccatgccagttacaggcatcgcncgctgtccagtgcagggggtgggaaccgccnaccggtgggtgaagatgnnnnnnnnnnnnnnnnnnnnnnggacaattacatccagcctggggctgntgagatggagacgacgggaagccgggaccacttctctctctgagctccatctttggacacttccctccnnnnnnnnnnnnnnnaagacagtgagtgactcctcaagtctcagggtcagagttcgctagtatctaaagcttgaccaggagctggttttctgacac

SEQ ID NO: 446 - DNA, 297 bp, Mus musculus; identical to SEQ ID NO: 445
  misc_feature (36)..(36): n is a, c, g, or t
  misc_feature (67)..(67): n is a, c, g, or t
  misc_feature (85)..(106): n is a, c, g, or t
  misc_feature (133)..(133): n is a, c, g, or t
  misc_feature (202)..(216): n is a, c, g, or t

SEQ ID NO: 447 - DNA, 545 bp, Mus musculus
  misc_feature (55)..(55): n is a, c, g, or t
  misc_feature (182)..(196): n is a, c, g, or t
  misc_feature (206)..(206): n is a, c, g, or t
  misc_feature (411)..(411): n is a, c, g, or t
  misc_feature (414)..(416): n is a, c, g, or t
  misc_feature (419)..(426): n is a, c, g, or t
  misc_feature (498)..(498): n is a, c, g, or t
  misc_feature (507)..(508): n is a, c, g, or t
aaactgcaggagtcggggcagcaacgctgggatgagagctggcagcacactgtgntccctctgctcgctcactcacagatgacccccaggccccatccaccctgtggccacccttcctgccggggcttttgagtgccccctagtggtcataagcctgaggacagcagtgggcgacagctagnnnnnnnnnnnnnnnctggcagctntcttctgttctgagcacttctgttacttccagtgtccctgccaacttctcagtccctgggtttttgtttctggacttgtcacatcccttgcgttctggttctgctgtgagctctgggatagcctgtgttcactgggtttggctgagcaaggctgaactgtctgacaggacagtcatacttaataaatgtatatatttatttgtanaannnaannnnnnnntctgagcctgtgtccactcgagatgagctgctgaggacaggcaccagcactcagcctgtgcttactgtacanttgtgctgnntatttaacattcctgctcaacagaagcctttcccgtt

SEQ ID NO: 448 - DNA, 545 bp, Mus musculus; identical to SEQ ID NO: 447
  misc_feature (55)..(55): n is a, c, g, or t
  misc_feature (182)..(196): n is a, c, g, or t
  misc_feature (206)..(206): n is a, c, g, or t
  misc_feature (411)..(411): n is a, c, g, or t
  misc_feature (414)..(416): n is a, c, g, or t
  misc_feature (419)..(426): n is a, c, g, or t
  misc_feature (498)..(498): n is a, c, g, or t
  misc_feature (507)..(508): n is a, c, g, or t

SEQ ID NO: 449 - DNA, 577 bp, Mus musculus
  misc_feature (255)..(255): n is a, c, g, or t
  misc_feature (261)..(277): n is a, c, g, or t
  misc_feature (429)..(519): n is a, c, g, or t
atcgaatagacaaggcagtgtacagttttatgtctgatagaggaggtagccaacaaacaattcctagttatacaagtacatggaccacacttgaggaacacagcaagggatggtaagtggagttctggtatacctcatcttcactcaacatggctattttgttagataaacaagacactacaaaggtggggcttttttattttctacatgtatttaaaggtattttatatgtcctacatagatctggatgctaanaccaannnnnnnnnnnnnnnnnaccttaagaatttttactataccctaatgtctgtgtctgtatgaagcaatgtatcaccctgttttcatttgtatggttgtaaggtaaggaatcctagctgtcgagatgctgtggaaaacagtctcaggcacaatcaaatacggtctcggtgnnnnnnnnnnnnnnnnnnnnnnnnnnnnnnnnnnnnnnnnnnnnnnnnnnnnnnnnnnnnnnnnnnnnnnnnnnnnnnnnnnnnnnnnnnntgtgaagtgctgtgtgatttttttttttaaagcaatgtatgcctgtagaatgcttcta

SEQ ID NO: 450 - DNA, 577 bp, Mus musculus; identical to SEQ ID NO: 449
  misc_feature (255)..(255): n is a, c, g, or t
  misc_feature (261)..(277): n is a, c, g, or t
  misc_feature (429)..(519): n is a, c, g, or t

SEQ ID NO: 451 - DNA, 533 bp, Mus musculus
  misc_feature (29)..(29): n is a, c, g, or t
  misc_feature (44)..(44): n is a, c, g, or t
  misc_feature (478)..(478): n is a, c, g, or t
  misc_feature (480)..(480): n is a, c, g, or t
  misc_feature (482)..(482): n is a, c, g, or t
  misc_feature (484)..(487): n is a, c, g, or t
  misc_feature (489)..(492): n is a, c, g, or t
cttctgtttgagtaaagccttggtgttgntttatcttagtttanatttttactttttaaaaagcagcaacggatgcttttaaagaagtattgtgactgtagcactgggaaatgtggcccgtgccccagcttgttgtagctgtggcatagagttgggcaaaagagcggtgatggactcattgcaaccatacatacttgaagagtccattgaccgaagctctttatagactgttttgtaaatggggaaatcacagactgttgaacgccgcctgcactctaacggtcctagagctgctgggacctctcctatcatgtcagacttggacttttttccttcttgtttaaaggacataaaatcatagaatccatataatctgtggagtcatcctgacccacatgtagatctgtatctaatattatttggatttggacaagtgtcaatgacatggctgtgtaataaaatttttattaaaaatacnananannnnannnnctttgccactccccatctgcagctgctgaaaccctcatgct

SEQ ID NO: 452 - DNA, 533 bp, Mus musculus; identical to SEQ ID NO: 451
  misc_feature (29)..(29): n is a, c, g, or t
  misc_feature (44)..(44): n is a, c, g, or t
  misc_feature (478)..(478): n is a, c, g, or t
  misc_feature (480)..(480): n is a, c, g, or t
  misc_feature (482)..(482): n is a, c, g, or t
  misc_feature (484)..(487): n is a, c, g, or t
  misc_feature (489)..(492): n is a, c, g, or t

SEQ ID NO: 453 - DNA, 525 bp, Mus musculus
  misc_feature (63)..(63): n is a, c, g, or t
  misc_feature (166)..(167): n is a, c, g, or t
  misc_feature (313)..(313): n is a, c, g, or t
  misc_feature (331)..(331): n is a, c, g, or t
  misc_feature (342)..(342): n is a, c, g, or t
  misc_feature (348)..(348): n is a, c, g, or t
  misc_feature (354)..(354): n is a, c, g, or t
  misc_feature (357)..(357): n is a, c, g, or t
  misc_feature (363)..(378): n is a, c, g, or t
  misc_feature (435)..(435): n is a, c, g, or t
  misc_feature (443)..(444): n is a, c, g, or t
  misc_feature (457)..(457): n is a, c, g, or t
catttccactgatgtggttaaaattacttgaatgatggccacttaaaacgtaagccaggggcnagggctcagggacgctccgcccatacaacccatgatgctgccccttgccatgcccatgctgctggtcccacccctgcccctggtgccaggcctctgaaggagnnagagaaagatactctagaattgcagactgatggagctcctttaggctagataggatagcctgacgtagcatagtctcattggcaaatgaactgcatcgtcagtgtttgggggcaccaggggtcagggacagatgagcccacaggcngtgctagggccacgtgtnccgtcccagcnaggcancagcancancagcannnnnnnnnnnnnnnntgtttgaggcagtgtggtgaatggcgtggtgagccagaacccatcagggctgcagcntgtaggcnncccatgctgggtntgctcgttagcaccacgcaccatcgcctgcctccccccctgacaggccgtgactgtcttgcactacag

SEQ ID NO: 454 - DNA, 525 bp, Mus musculus; identical to SEQ ID NO: 453
  misc_feature (63)..(63): n is a, c, g, or t
  misc_feature (166)..(167): n is a, c, g, or t
  misc_feature (313)..(313): n is a, c, g, or t
  misc_feature (331)..(331): n is a, c, g, or t
  misc_feature (342)..(342): n is a, c, g, or t
  misc_feature (348)..(348): n is a, c, g, or t
  misc_feature (354)..(354): n is a, c, g, or t
  misc_feature (357)..(357): n is a, c, g, or t
  misc_feature (363)..(378): n is a, c, g, or t
  misc_feature (435)..(435): n is a, c, g, or t
  misc_feature (443)..(444): n is a, c, g, or t
  misc_feature (457)..(457): n is a, c, g, or t

SEQ ID NO: 455 - DNA, 461 bp, Mus musculus
  misc_feature (173)..(173): n is a, c, g, or t
  misc_feature (251)..(251): n is a, c, g, or t
agttgtgcctagtcgaagtgcccccctccttgggccccacccgccatgagagctgtcagtgtgtggtattgctgcccatggggactactgctgctacactgtctgtgcagcttcagtgtggggtctccgtctccttctatcagcccagagaagaaggtaggaagccaggggcntgaggttccggctggctggctttcctagaaagccctatgaaggtcgagtggagatacagcgagctggtgaatggggcnccatctgtgatgatgacttcacgctgcaggctgcccatgtcctctgccgggagctgggcttcacagaagccacagggtggacccatagtgccaaatatggccctggaacaggccgaatctggttggacaatctgagctgcagggggactgaaggaagtgtgacagaatgcgcctctcggggctggggaaacagtgactgtacccatgatg

SEQ ID NO: 456 - DNA, 461 bp, Mus musculus; identical to SEQ ID NO: 455
  misc_feature (173)..(173): n is a, c, g, or t
  misc_feature (251)..(251): n is a, c, g, or t

SEQ ID NO: 457 - DNA, 549 bp, Mus musculus
  misc_feature (78)..(78): n is a, c, g, or t
  misc_feature (118)..(118): n is a, c, g, or t
  misc_feature (132)..(132): n is a, c, g, or t
  misc_feature (249)..(249): n is a, c, g, or t
  misc_feature (280)..(280): n is a, c, g, or t
  misc_feature (289)..(289): n is a, c, g, or t
  misc_feature (324)..(324): n is a, c, g, or t
aacataaagccagtgttccatgcaccaagtccagtacagaagacaaaaagagtcacagaagatggaaaagctagctantcagaaatcctgggaatgttaagtgtgccggccatgtggntatgcggcaatgcntgtaccttcccacttgggaacctgcagtgggccctccagctggctcccttcatgaaatcctcccctccgagataacatctgaaggattgatggcagattcagtttccattaggaganattttcctttggagacaggggttctctattnaaatatctncttaggttttcagctaaactttgctttggcttcanctatagtggggttctttctaagtaaagtaatgttcaaataagtgttttgtattggaagctttgttatcaagattttcatacttatatccatgggctgcttttaaggttgatacttttaggcgtggctgatgcctatagcactgtacatacaagaaatatataagtgtatttggcatacttaaggtaaaataagtctccagttggctactgttacatataatggct

SEQ ID NO: 458 - DNA, 549 bp, Mus musculus; identical to SEQ ID NO: 457
  misc_feature (78)..(78): n is a, c, g, or t
  misc_feature (118)..(118): n is a, c, g, or t
  misc_feature (132)..(132): n is a, c, g, or t
  misc_feature (249)..(249): n is a, c, g, or t
  misc_feature (280)..(280): n is a, c, g, or t
  misc_feature (289)..(289): n is a, c, g, or t
  misc_feature (324)..(324): n is a, c, g, or t

SEQ ID NO: 459 - DNA, 289 bp, Mus musculus
cagtcaactcctcctagaggaagggttgtgtgtggttgaatttcctactcaggtaaaatcaaaggttattataaagtatataaatagtattgaaaagacccccaagatgcagattgtgttaagaagagagggtaatagacattttaattgtaactacagagctatgattctattcaaatctgataagtacaaatgttttgtcctttgtcccaacttttttcctatcaaagcctaaagattagtataattcccaaagatggtcttggactgcctaaacctttgtatttgt

SEQ ID NO: 460 - DNA, 289 bp, Mus musculus; identical to SEQ ID NO: 459

SEQ ID NO: 461 - DNA, 372 bp, Mus musculus
  misc_feature (38)..(38): n is a, c, g, or t
  misc_feature (45)..(45): n is a, c, g, or t
  misc_feature (55)..(55): n is a, c, g, or t
  misc_feature (64)..(65): n is a, c, g, or t
  misc_feature (68)..(68): n is a, c, g, or t
  misc_feature (72)..(72): n is a, c, g, or t
  misc_feature (77)..(77): n is a, c, g, or t
  misc_feature (90)..(90): n is a, c, g, or t
  misc_feature (99)..(99): n is a, c, g, or t
  misc_feature (108)..(108): n is a, c, g, or t
  misc_feature (111)..(111): n is a, c, g, or t
  misc_feature (116)..(116): n is a, c, g, or t
  misc_feature (124)..(125): n is a, c, g, or t
  misc_feature (139)..(139): n is a, c, g, or t
  misc_feature (151)..(151): n is a, c, g, or t
  misc_feature (154)..(154): n is a, c, g, or t
  misc_feature (165)..(166): n is a, c, g, or t
  misc_feature (174)..(174): n is a, c, g, or t
  misc_feature (177)..(177): n is a, c, g, or t
  misc_feature (256)..(256): n is a, c, g, or t
  misc_feature (335)..(335): n is a, c, g, or t
  misc_feature (346)..(346): n is a, c, g, or t
taaagtgatcacctcagcagcccagtgttgtggctttntagcacnccctgtactnccgtattcnngancacngtaangctactgtgctgncccagaaangatttctangtngaatncacttacnncatatggtgcactnccatgcaatctngangtatatttttnntgtcagtnagnccccaaaatgtagcgaaacttgggtatcaggccatttcatcctcagacttgtagaagtacattttctggtcttgagacntgtattttttagttatgtatgcaactgcctttattacacacctggttatcacaattcaactctcaggtgttgcagaaanaaaaatctacntctttcagactgtagatggaaataac

SEQ ID NO: 462 - DNA, 372 bp, Mus musculus; identical to SEQ ID NO: 461
  misc_feature (38)..(38): n is a, c, g, or t
  misc_feature (45)..(45): n is a, c, g, or t
  misc_feature (55)..(55): n is a, c, g, or t
  misc_feature (64)..(65): n is a, c, g, or t
  misc_feature (68)..(68): n is a, c, g, or t
  misc_feature (72)..(72): n is a, c, g, or t
  misc_feature (77)..(77): n is a, c, g, or t
  misc_feature (90)..(90): n is a, c, g, or t
  misc_feature (99)..(99): n is a, c, g, or t
  misc_feature (108)..(108): n is a, c, g, or t
  misc_feature (111)..(111): n is a, c, g, or t
  misc_feature (116)..(116): n is a, c, g, or t
  misc_feature (124)..(125): n is a, c, g, or t
  misc_feature (139)..(139): n is a, c, g, or t
  misc_feature (151)..(151): n is a, c, g, or t
  misc_feature (154)..(154): n is a, c, g, or t
  misc_feature (165)..(166): n is a, c, g, or t
  misc_feature (174)..(174): n is a, c, g, or t
  misc_feature (177)..(177): n is a, c, g, or t
  misc_feature (256)..(256): n is a, c, g, or t
  misc_feature (335)..(335): n is a, c, g, or t
  misc_feature (346)..(346): n is a, c, g, or t

SEQ ID NO: 463 - DNA, 582 bp, Mus musculus
  misc_feature (178)..(193): n is a, c, g, or t
  misc_feature (310)..(310): n is a, c, g, or t
  misc_feature (318)..(318): n is a, c, g, or t
  misc_feature (343)..(343): n is a, c, g, or t
  misc_feature (363)..(363): n is a, c, g, or t
atgtgcttgcctgtaaaatttgcatttataaatgtgttgcgatggatcacttcggcctgtacacatccaattagcgtgaccacttccatcttaaaaacaaatctaaacaaaatttattattattatatatatataaaggactgtgggttgtatacaaactattgcaaacacttgtgcnnnnnnnnnnnnnnnnaaaggaaaagcaaacgctgtgtaacattactacttgaatgcctttgtgactgaattttttttttcattttaaatataaacttttttgtggaaagtatgctcaatgtttttttccccntccccccnattcccttgtaaatacattttgttntatgtgacttggtttggaantagttaactggtactgtaatttgcattaaataaaaagtaggttagcctggaaatgaaattaaacttcaccagtgtgtggtctttatttcagtgcccatccccctctcttcacccttcccactctgccatcgccacatgcagtcacactgccgtctccactcctctgacagaggaaacatgaatccttgagagaaaaatcaggactctccttctctgaga

SEQ ID NO: 464 - DNA, 582 bp, Mus musculus; identical to SEQ ID NO: 463
  misc_feature (178)..(193): n is a, c, g, or t
  misc_feature (310)..(310): n is a, c, g, or t
  misc_feature (318)..(318): n is a, c, g, or t
  misc_feature (343)..(343): n is a, c, g, or t
  misc_feature (363)..(363): n is a, c, g, or t

SEQ ID NO: 465 - DNA, 428 bp, Mus musculus
  misc_feature (26)..(26): n is a, c, g, or t
  misc_feature (56)..(56): n is a, c, g, or t
  misc_feature (64)..(64): n is a, c, g, or t
  misc_feature (104)..(104): n is a, c, g, or t
  misc_feature (106)..(108): n is a, c, g, or t
  misc_feature (176)..(176): n is a, c, g, or t
  misc_feature (277)..(278): n is a, c, g, or t
  misc_feature (294)..(332): n is a, c, g, or t
  misc_feature (342)..(342): n is a, c, g, or t
  misc_feature (393)..(393): n is a, c, g, or t
  misc_feature (395)..(395): n is a, c, g, or t
gcctttcagtgcagagtagtgactanacattacaagaagaccggccgggcagttcnaggaatcngggggcggggcgtactggccgggtaaatacccgcgcgcgngnnntccgaggcggctctaactctgactctacactcgcctgctcttacgaccgctgtctctccgggctcccngacgcccccttcccggcccagctctccgtcgaggtccctcgcccaggtcctttgcctgattcgcccaggagtgcgcctcatcggcccggggagcagcgaanncagagggggcgcacgnnnnnnnnnnnnnnnnnnnnnnnnnnnnnnnnnnnnnnnctgggcgcancgcgagccactgctggccgccgcctcgcctcggggaccataggaggcgcancnccaaggccggagatttcgcttcgggactagctc

SEQ ID NO: 466 - DNA, 428 bp, Mus musculus; identical to SEQ ID NO: 465
  misc_feature (26)..(26): n is a, c, g, or t
  misc_feature (56)..(56): n is a, c, g, or t
  misc_feature (64)..(64): n is a, c, g, or t
  misc_feature (104)..(104): n is a, c, g, or t
  misc_feature (106)..(108): n is a, c, g, or t
  misc_feature (176)..(176): n is a, c, g, or t
  misc_feature (277)..(278): n is a, c, g, or t
  misc_feature (294)..(332): n is a, c, g, or t
  misc_feature (342)..(342): n is a, c, g, or t
  misc_feature (393)..(393): n is a, c, g, or t
  misc_feature (395)..(395): n is a, c, g, or t

SEQ ID NO: 467 - DNA, 471 bp, Mus musculus
  misc_feature (59)..(59): n is a, c, g, or t
  misc_feature (201)..(215): n is a, c, g, or t
  misc_feature (278)..(278): n is a, c, g, or t
  misc_feature (315)..(315): n is a, c, g, or t
tgagccagggactcactggagccatcagagctgtgctggacagtaagttaccatgagcntctttgtccttcagggggcactgagaggcagcaaaggacctaatttatttttcttactgtgtttcctgctctatctagagaggaaaaggaacagaacagagagtttctgccttccatagattaaaaaccaaagagaagactnnnnnnnnnnnnnnnaagaggatgtgccatgtctgtgtgggcccatctgcagtccccatcagagtaggcagccaggcnaggagaacctgtcttgtcccagcacctgctgcctgancctgccaagcctccctcagttaggaattcataattcacaaactgtcagcccctggcaagacctgtgtgcccttcaaccactgaatgtccccaaagcttttttggtaggtggcagaatttaaattcaataaagcttgtcttgatttgtgtggagtcc

SEQ ID NO: 468 - DNA, 471 bp, Mus musculus; identical to SEQ ID NO: 467
  misc_feature (59)..(59): n is a, c, g, or t
  misc_feature (201)..(215): n is a, c, g, or t
  misc_feature (278)..(278): n is a, c, g, or t
  misc_feature (315)..(315): n is a, c, g, or t

SEQ ID NO: 469 - DNA, 408 bp, Mus musculus
  misc_feature (84)..(136): n is a, c, g, or t
tgcattgggtgatgcagtcaaccaccccactcccatggcagctgcagccaatgaggtatacaaaagagccaaggcactggaccnnnnnnnnnnnnnnnnnnnnnnnnnnnnnnnnnnnnnnnnnnnnnnnnnnnnncctgcccatctaccctcccatcttccctctgacctcccctcccagtgtggggtcagggttctgggactagctctggaccagtcacctgtctccatttccttttatacagactttgaaacttgcatcagcacagtacacagcagcaccctgtctccctgaggccctggccagggataagaggatctatctctcctggtggctgtgaagaagctcttgagctgggccttgattgaccctggagcaggaggttgtggattctctctgttcctctg

SEQ ID NO: 470 - DNA, 408 bp, Mus musculus; identical to SEQ ID NO: 469
  misc_feature (84)..(136): n is a, c, g, or t

SEQ ID NO: 471 - DNA, 396 bp, Mus musculus
  misc_feature (210)..(210): n is a, c, g, or t
  misc_feature (315)..(315): n is a, c, g, or t
  misc_feature (358)..(358): n is a, c, g, or t
gaaggatttgcacactcgtcttgcctaggaagtgcaatctccttgtgactggagcacactggcagccttcaggtgtcataatcatacatcccagagaagagcagtcacctgctgtcactagtgcatgggaagacagatgcacagaagagccaggtagcacctgaaaacgctgcacgtgtgtttgtgaaacctgtagtgaagtagacttgnccgtccctggacagtgaggtcagatgtgaatacatattgtaagagcacgttgaatagtgtgcattactgtggggaaacaccgaaactgctgttgtttttcatttntactgtattttagttgcagcctatttttaataaactttgtatntatttaagtgtatttgctattgttttcaaagtgctgac

SEQ ID NO: 472 - DNA, 396 bp, Mus musculus; identical to SEQ ID NO: 471
  misc_feature (210)..(210): n is a, c, g, or t
  misc_feature (315)..(315): n is a, c, g, or t
  misc_feature (358)..(358): n is a, c, g, or t

SEQ ID NO: 473 - DNA, 304 bp, Mus musculus
  misc_feature (93)..(93): n is a, c, g, or t
  misc_feature (100)..(114): n is a, c, g, or t
  misc_feature (220)..(220): n is a, c, g, or t
gtcccagattttgtatattagaacaaaagtttctatgaattagcataactaaaagtaaatattgtaagtgaagcccacttctgagccatgcgncttctgnnnnnnnnnnnnnnnctttagaaggttactcaagacaggagccgagtggcttaggccgggccaggaaatgtgctatggcgtcacatcagcatcgggtttttctttccatgatggccgtagnaagacctcactttcataacacgctcctcctgatactttgtgtaaagatacttttcattaaagattctctcaggagggatgtggc

SEQ ID NO: 474 - DNA, 304 bp, Mus musculus; identical to SEQ ID NO: 473
  misc_feature (93)..(93): n is a, c, g, or t
  misc_feature (100)..(114): n is a, c, g, or t
  misc_feature (220)..(220): n is a, c, g, or t

SEQ ID NO: 475 - DNA, 396 bp, Mus musculus
  misc_feature (55)..(55): n is a, c, g, or t
  misc_feature (97)..(97): n is a, c, g, or t
  misc_feature (121)..(121): n is a, c, g, or t
ctccgaggacgtagaacatgcgagttcatagtcctgcatctactcttagctgcantcttgccagagcctggcctcagactgcaggacctgacctctnccttcatctttccacatactgggncaaaaaaacacaaaggaaaggaagaaaattatatatatataattatatatatataatataaaatcacttggtgattaaaaaaataactgctcaataaataaaactcctaaagtcactatgtttaaagggtttggttttttgggggtgggtgggaaatattgtaaatatatattttttgttgcttatttagagtcgatctccaatgttgtgctaagatttttaaattaaatgtaagcattaagggaatgagtcttaggccaccagctgacacattg

SEQ ID NO: 476 - DNA, 396 bp, Mus musculus; identical to SEQ ID NO: 475
  misc_feature (55)..(55): n is a, c, g, or t
  misc_feature (97)..(97): n is a, c, g, or t
  misc_feature (121)..(121): n is a, c, g, or t

SEQ ID NO: 477 - DNA, 517 bp, Mus musculus
  misc_feature (27)..(68): n is a, c, g, or t
  misc_feature (451)..(451): n is a, c, g, or t
  misc_feature (454)..(454): n is a, c, g, or t
  misc_feature (457)..(457): n is a, c, g, or t
  misc_feature (459)..(459): n is a, c, g, or t
tgaactacctaatccagggaatgaccnnnnnnnnnnnnnnnnnnnnnnnnnnnnnnnnnnnnnnnnnnagtcctgccttcaagattgattttgatctccatgacctgataccgtcttgtgaaaggaccttcctttggagatattctttaagcaagttgtgaagaccctgaaacccaaaagaacgtacatgaggtttttgtgtgagcttatgctcagaacaacagtgtttagcaagtggcatctgacaggtgtgaatattttcctacaatgtggctgtgagatccttgcctgacttcctgttgctgctttagaacactaaaagtctttcaaaactggaaaaatgcactggcaggggagaataattttacccatttaaaaaaatggcacgatttttagtcatattagggatatctgtcacatagtaggcacttaataaatatttgtcaaatanaanaananaaaccacgaggacgaacggatgccggttgtcggcgtattgagcaaactcattgggcgg

SEQ ID NO: 478 - DNA, 517 bp, Mus musculus; identical to SEQ ID NO: 477
  misc_feature (27)..(68): n is a, c, g, or t
  misc_feature (451)..(451): n is a, c, g, or t
  misc_feature (454)..(454): n is a, c, g, or t
  misc_feature (457)..(457): n is a, c, g, or t
  misc_feature (459)..(459): n is a, c, g, or t

SEQ ID NO: 479 - DNA, 424 bp, Mus musculus
  misc_feature (259)..(259): n is a, c, g, or t
  misc_feature (328)..(328): n is a, c, g, or t
  misc_feature (345)..(345): n is a, c, g, or t
  misc_feature (376)..(376): n is a, c, g, or t
  misc_feature (379)..(379): n is a, c, g, or t
tttttctcaatctggtcataagggcacaggaaagttgcactaagactccaaacctcagttgaggtaccctacctggcctggattccagaggttgattgcactcagggagactactacaaaaccaaagcacaacccctgggcagaccctaaccctcccattccaggtccaggtctgtcacttgatggtttgagaaccacccagtatcttcaagtctccttccaccgggaaaatcgaaccccgggctcccctagcgttaanctcctcctacaaagcccttttggatttttaactccaagctccacccatcgcagaactctagtttacccngactccgccctctcccngacgctcacgcggaaatccgcgcgcagcggnccngcatcccgcccgggtggccccgcgcctcaccatggcgttgacttg

SEQ ID NO: 480 - DNA, 424 bp, Mus musculus; identical to SEQ ID NO: 479
  misc_feature (259)..(259): n is a, c, g, or t
  misc_feature (328)..(328): n is a, c, g, or t
  misc_feature (345)..(345): n is a, c, g, or t
  misc_feature (376)..(376): n is a, c, g, or t
  misc_feature (379)..(379): n is a, c, g, or t

SEQ ID NO: 481 - DNA, 527 bp, Mus musculus
  misc_feature (92)..(92): n is a, c, g, or t
  misc_feature (211)..(211): n is a, c, g, or t
  misc_feature (233)..(233): n is a, c, g, or t
  misc_feature (305)..(305): n is a, c, g, or t
  misc_feature (336)..(336): n is a, c, g, or t
gacatgcacacactcaaaagagaaccattatagagtagagaagaaatacaaaatccacgagaggacttgtgcccgtggaaacaggcagggcntatatgtgctcagatgaatcatttattattgtgtaaataaaggtgtagtctcagttttggaaggatggcgtggggtttgggctgaacaaagtaggacagcagaggagacaggctggaanctgcgccacctttcctgtcagngaaagggacagcttagtgagaaccttttatcctgataactgaattctggccatcctaaatgtatcaaagaanccattaaaaagcaaagaggcaaaaaaaaaanaaaacaatgggccgaagcttatccgtttagtgggggtaatttagcttcgctgcggtcgttcaacgcgtgctgggaccctgcggtcgaaatatcgcttgcgatccgtttgcaatggtaatggaaagccgcccgtcgctccaaaatccgcggggtgggatggtgcgcccgtttcgagacattgcggggattgt

SEQ ID NO: 482 - DNA, 527 bp, Mus musculus; identical to SEQ ID NO: 481
  misc_feature (92)..(92): n is a, c, g, or t
  misc_feature (211)..(211): n is a, c, g, or t
  misc_feature (233)..(233): n is a, c, g, or t
  misc_feature (305)..(305): n is a, c, g, or t
  misc_feature (336)..(336): n is a, c, g, or t

SEQ ID NO: 483 - DNA, 150 bp, Mus musculus
aacccttcgcctgtcatttccaggacatatcttactgccccacaccaaccacgactctaagagattttttctgacgcactcctatgcatgtgaataacatgtcgcgtgattctgcttcttacagaagtattgccaaaggtattatttcca

SEQ ID NO: 484 - DNA, 150 bp, Mus musculus; identical to SEQ ID NO: 483

SEQ ID NO: 485 - DNA, 565 bp, Mus musculus
  misc_feature (36)..(38): n is a, c, g, or t
  misc_feature (41)..(42): n is a, c, g, or t
  misc_feature (44)..(48): n is a, c, g, or t
  misc_feature (297)..(318): n is a, c, g, or t
  misc_feature (423)..(423): n is a, c, g, or t
  misc_feature (432)..(432): n is a, c, g, or t
  misc_feature (522)..(522): n is a, c, g, or t
  misc_feature (524)..(540): n is a, c, g, or t
cttatactgagcagggccctctcagctgtcttgttnnnggnncnnnnnctccattagagacatgatgcctttatgaattaatttctccaacccttcgcctgtcatttccaggacatatcttactgccccacaccaaccacgactctaagagattttttctgacgcactcctatgcatgtgaataacatgtcgcgtgattctgcttcttacagaagtattgccaaaggtattatttccaatattatttggttcattgctgatctttttttatacgtgcagccccttcctttccgccannnnnnnnnnnnnnnnnnnnnncttctctctattgctccctccccgggggtcaccggcactgcctttgcttttgctcggttggagccccctcttgttgagagcacaggcagtgttttgggtgatggntcttgagcntgtcaccccaaaccaaagcgaaacacagacctggtaccgaagacacttcgtattcccaaagccgtgtgccagggtgtatgacaccttccntnnnnnnnnnnnnnnnnnatgatatgcgagtcacatttattct

SEQ ID NO: 486 - DNA, 565 bp, Mus musculus; identical to SEQ ID NO: 485
  misc_feature (36)..(38): n is a, c, g, or t
  misc_feature (41)..(42): n is a, c, g, or t
  misc_feature (44)..(48): n is a, c, g, or t
  misc_feature (297)..(318): n is a, c, g, or t
  misc_feature (423)..(423): n is a, c, g, or t
  misc_feature (432)..(432): n is a, c, g, or t
  misc_feature (522)..(522): n is a, c, g, or t
  misc_feature (524)..(540): n is a, c, g, or t

SEQ ID NO: 487 - DNA, 424 bp, Mus musculus
  misc_feature (28)..(28): n is a, c, g, or t
  misc_feature (33)..(33): n is a, c, g, or t
  misc_feature (42)..(42): n is a, c, g, or t
  misc_feature (47)..(47): n is a, c, g, or t
  misc_feature (110)..(110): n is a, c, g, or t
  misc_feature (125)..(125): n is a, c, g, or t
  misc_feature (130)..(141): n is a, c, g, or t
  misc_feature (195)..(195): n is a, c, g, or t
  misc_feature (299)..(302): n is a, c, g, or t
  misc_feature (305)..(305): n is a, c, g, or t
  misc_feature (324)..(324): n is a, c, g, or t
  misc_feature (326)..(326): n is a, c, g, or t
  misc_feature (385)..(385): n is a, c, g, or t
aaggtcgttgattccatggataacgtanataangttgtccangaganggaagatgctctaaggcttcttcagaccggtcaagaaaagcccagacccggtgcttggagaanggacatctttggacnaattnnnnnnnnnnnnttcaagcagtggcctataccttggtacctaaataaaagatacaacaggaggcgnttcttcgcaatgccttatgtggatcgctttatcagactaagaattgagaaacacgcccgcattgaagcaagaaagagaagtttacagaaaaagaaagaaaaaannnnccntgcaaagttcccacatctntntcaagaacggaaatcaagtagtgtctaagatgagacccagaagtctggttccattgttnttaaagcctgtgtcctgacgtgaatacctgttaagcagt

SEQ ID NO: 488 - DNA, 424 bp, Mus musculus; identical to SEQ ID NO: 487
  misc_feature (28)..(28): n is a, c, g, or t
  misc_feature (33)..(33): n is a, c, g, or t
  misc_feature (42)..(42): n is a, c, g, or t
  misc_feature (47)..(47): n is a, c, g, or t
  misc_feature (110)..(110): n is a, c, g, or t
  misc_feature (125)..(125): n is a, c, g, or t
  misc_feature (130)..(141): n is a, c, g, or t
  misc_feature (195)..(195): n is a, c, g, or t
  misc_feature (299)..(302): n is a, c, g, or t
  misc_feature (305)..(305): n is a, c, g, or t
  misc_feature (324)..(324): n is a, c, g, or t
  misc_feature (326)..(326): n is a, c, g, or t
  misc_feature (385)..(385): n is a, c, g, or t

SEQ ID NO: 489 - DNA, 502 bp, Mus musculus
  misc_feature (102)..(102): n is a, c, g, or t
  misc_feature (475)..(477): n is a, c, g, or t
gccgagtcagagaggcccatcctgccagccaaccagaagctgatcactctatctgtacaagatgcacccacaaagaaagagtttgtcatcaatcccaatggnaagtctgaggtttgcatcctgcacgaatacatgcagcgtgtcctcaaggtccgccctgtttataatttctttgaatgtgagaatccaagtgagccttttggtgcctccgtgaccattgatggtgtgacttacggatctggaactgcaagcagcaaaaaacttgcgaagaataaagctgcccgagccaccctggaaattctcatccctgactttgttaaacagacctctgaggagaagcctaaagacagtgaagaactggagtattttaaccacatcagtattgaggattcacgagtctatgagctgacaagcaaggctgggctgttgtctccatatcagatcctccatgagtgccttaaaagaaaccatggannnggtgacacatccatcaagtttgaag

SEQ ID NO: 490 - DNA, 502 bp, Mus musculus; identical to SEQ ID NO: 489
  misc_feature (102)..(102): n is a, c, g, or t
  misc_feature (475)..(477): n is a, c, g, or t

SEQ ID NO: 491 - DNA, 343 bp, Mus musculus
  misc_feature (49)..(66): n is a, c, g, or t
  misc_feature (101)..(101): n is a, c, g, or t
  misc_feature (116)..(147): n is a, c, g, or t
  misc_feature (170)..(170): n is a, c, g, or t
  misc_feature (216)..(231): n is a, c, g, or t
  misc_feature (314)..(314): n is a, c, g, or t
ggcacaggccaggaaccacctcaatcagcaggacatcctcaccaccctnnnnnnnnnnnnnnnnnncccatcctgaatgcacagcctccccggctttgccnttcagcccctgcttnnnnnnnnnnnnnnnnnnnnnnnnnnnnnnnnagaagggacagcaggagtgaganggggagggagctggctcagcaccacccctcccagccctgccccacnnnnnnnnnnnnnnnnccctctgagaggggaaaagggcggctgggagggctttccacctgatgtccctggtggaacaggtgcttctgggcgggccagcntctaatttgcacacctgaaatcgcggaat

SEQ ID NO: 492 - DNA, 343 bp, Mus musculus; identical to SEQ ID NO: 491
  misc_feature (49)..(66): n is a, c, g, or t
  misc_feature (101)..(101): n is a, c, g, or t
  misc_feature (116)..(147): n is a, c, g, or t
  misc_feature (170)..(170): n is a, c, g, or t
  misc_feature (216)..(231): n is a, c, g, or t
  misc_feature (314)..(314): n is a, c, g, or t

SEQ ID NO: 493 - DNA, 565 bp, Mus musculus
  misc_feature (146)..(146): n is a, c, g, or t
  misc_feature (148)..(148): n is a, c, g, or t
  misc_feature (150)..(150): n is a, c, g, or t
  misc_feature (152)..(154): n is a, c, g, or t
  misc_feature (157)..(157): n is a, c, g, or t
  misc_feature (351)..(351): n is a, c, g, or t
  misc_feature (363)..(363): n is a, c, g, or t
  misc_feature (368)..(368): n is a, c, g, or t
  misc_feature (387)..(387): n is a, c, g, or t
  misc_feature (420)..(420): n is a, c, g, or t
  misc_feature (446)..(446): n is a, c, g, or t
tgctggggctccttacttccctctgccccatttcctgtctcaactcttgccctgccagcacggctgtggaacagctgtcctcaggttgtgatgtggctgtacactgtcttaaaatcagagcagctttgacaacccaaacgaagagntncngnnnagnctgaatgcagcctgttgactatggagggtccctcgtagaaggaggggttgggaagggtcatcagtcatcacctgagatcgtagccactctcctgcaccccatcctcagctattctgctcctggagcatgagttattttatgtgttcttgggcgatgctggtctatgtaaggggtgggggcgcggggttgattgnagtgagggctcnttctntgttgctttggggaccttntctattctggggtgggtttttctgtgaagcagnttctttggggtaacctagcccccttntcagtaagcctaagagagtcaaaggaccaccgagctggacttgagtgtacgcctacttttgatgcaacatctgggaaaagtactttttttgttaatgtatccttgaagctaagaaaagc

SEQ ID NO: 494 - DNA, 565 bp, Mus musculus; identical to SEQ ID NO: 493
  misc_feature (146)..(146): n is a, c, g, or t
  misc_feature (148)..(148): n is a, c, g, or t
  misc_feature (150)..(150): n is a, c, g, or t
  misc_feature (152)..(154): n is a, c, g, or t
  misc_feature (157)..(157): n is a, c, g, or t
  misc_feature (351)..(351): n is a, c, g, or t
  misc_feature (363)..(363): n is a, c, g, or t
  misc_feature (368)..(368): n is a, c, g, or t
  misc_feature (387)..(387): n is a, c, g, or t
  misc_feature (420)..(420): n is a, c, g, or t
  misc_feature (446)..(446): n is a, c, g, or t

SEQ ID NO: 495 - DNA, 419 bp, Mus musculus
  misc_feature (34)..(62): n is a, c, g, or t
  misc_feature (91)..(91): n is a, c, g, or t
  misc_feature (94)..(94): n is a, c, g, or t
  misc_feature (155)..(155): n is a, c, g, or t
  misc_feature (276)..(276): n is a, c, g, or t
  misc_feature (341)..(341): n is a, c, g, or t
  misc_feature (343)..(344): n is a, c, g, or t
  misc_feature (381)..(381): n is a, c, g, or t
gacacctcctcagatcacagaagagaagcttccnnnnnnnnnnnnnnnnnnnnnnnnnnnnncactatttttagacaaaaagataatattntcngagttacggtgtcatctgtggtttattcttccgtacccactttgcttggcttttttttttnccctgtgaatctcagtttcgttggggacagacatgctggctatactgtagtgcccacagcccagttctgggaatgcgtccgttccgatgggtcgcctcctgcgctctgctttaagcttgcnacggtactgtcgctgttaacgtgaatgtatctctcacttcccccctcagccctccagtgctgtgnanntgagcacagaacgttgagaaggagtgagtgctcaccnaattccaaagaaaacttgtcagcaccaagaaactgctc

SEQ ID NO: 496 - DNA, 419 bp, Mus musculus; identical to SEQ ID NO: 495
  misc_feature (34)..(62): n is a, c, g, or t
  misc_feature (91)..(91): n is a, c, g, or t
  misc_feature (94)..(94): n is a, c, g, or t
  misc_feature (155)..(155): n is a, c, g, or t
  misc_feature (276)..(276): n is a, c, g, or t
  misc_feature (341)..(341): n is a, c, g, or t
  misc_feature (343)..(344): n is a, c, g, or t
  misc_feature (381)..(381): n is a, c, g, or t

SEQ ID NO: 497 - DNA, 99 bp, Mus musculus
  misc_feature (44)..(44): n is a, c, g, or t
tagaactaaatcagtgctaactagcattatagaagagtgggagnagccactgctgcctttagacaaactggactgtcacgtgcaacagtgtacaaaacc

SEQ ID NO: 498 - DNA, 99 bp, Mus musculus; identical to SEQ ID NO: 497
  misc_feature (44)..(44): n is a, c, g, or t

SEQ ID NO: 499 - DNA, 184 bp, Mus musculus
  misc_feature (78)..(80): n is a, c, g, or t
  misc_feature (97)..(99): n is a, c, g, or t
  misc_feature (102)..(112): n is a, c, g, or t
  misc_feature (115)..(115): n is a, c, g, or t
  misc_feature (117)..(117): n is a, c, g, or t
  misc_feature (119)..(119): n is a, c, g, or t
  misc_feature (121)..(136): n is a, c, g, or t
  misc_feature (139)..(139): n is a, c, g, or t
tacatttatttgtcagccaagaattaaatggagggaaggatgttcttagagtggccttattattttaagtgccccctnnnacccccaccccctttannnaannnnnnnnnnnaantngnannnnnnnnnnnnnnnnttntggggaacagtgacatttgatgtcaaaccagccagaagcactaat

SEQ ID NO: 500 - DNA, 184 bp, Mus musculus; identical to SEQ ID NO: 499
  misc_feature (78)..(80): n is a, c, g, or t
  misc_feature (97)..(99): n is a, c, g, or t
  misc_feature (102)..(112): n is a, c, g, or t
  misc_feature (115)..(115): n is a, c, g, or t
  misc_feature (117)..(117): n is a, c, g, or t
  misc_feature (119)..(119): n is a, c, g, or t
  misc_feature (121)..(136): n is a, c, g, or t
  misc_feature (139)..(139): n is a, c, g, or t

SEQ ID NO: 501 - DNA, 580 bp, Mus musculus
  misc_feature (33)..(133): n is a, c, g, or t
  misc_feature (187)..(190): n is a, c, g, or t
  misc_feature (193)..(195): n is a, c, g, or t
  misc_feature (197)..(197): n is a, c, g, or t
  misc_feature (200)..(200): n is a, c, g, or t
  misc_feature (203)..(250): n is a, c, g, or t
  misc_feature (268)..(268): n is a, c, g, or t
  misc_feature (270)..(270): n is a, c, g, or t
  misc_feature (289)..(289): n is a, c, g, or t
  misc_feature (292)..(292): n is a, c, g, or t
  misc_feature (299)..(299): n is a, c, g, or t
  misc_feature (335)..(335): n is a, c, g, or t
  misc_feature (357)..(357): n is a, c, g, or t
  misc_feature (366)..(366): n is a, c, g, or t
  misc_feature (407)..(407): n is a, c, g, or t
  misc_feature (410)..(415): n is a, c, g, or t
  misc_feature (417)..(421): n is a, c, g, or t
  misc_feature (424)..(424): n is a, c, g, or t
  misc_feature (426)..(426): n is a, c, g, or t
  misc_feature (457)..(477): n is a, c, g, or t
gccatggctttggttttgcttgttcttatttannnnnnnnnnnnnnnnnnnnnnnnnnnnnnnnnnnnnnnnnnnnnnnnnnnnnnnnnnnnnnnnnnnnnnnnnnnnnnnnnnnnnnnnnnnnnnnnnnnnntgacgttcttgcctgctacatggtgcagttataggttgcaccaccatactctgnnnnagnnntnggnatnnnnnnnnnnnnnnnnnnnnnnnnnnnnnnnnnnnnnnnnnnnnnnnncttggccccgtcctggtntntgtttccgtgtgctgattntgntcctggntccacgctagcaattctgaagcaacagtgaatcaantctggtctggcactgcctattntccctgttntccagtccaggaaaaaatgtataataaaataaaggaagccntcnnnnnnannnnnaananccacagaggaagccaccctgtggttttcttnnnnnnnnnnnnnnnnnnnnnggaatggctcatctgaagacactgccaccaagcctgatgacctgagttagacctcgggatccatgaggtagaagaagagaaatgagccctttaagccaccatc

SEQ ID NO: 502 - DNA, 580 bp, Mus musculus; identical to SEQ ID NO: 501
  misc_feature (33)..(133): n is a, c, g, or t
  misc_feature (187)..(190): n is a, c, g, or t
  misc_feature (193)..(195): n is a, c, g, or t
  misc_feature (197)..(197): n is a, c, g, or t
  misc_feature (200)..(200): n is a, c, g, or t
  misc_feature (203)..(250): n is a, c, g, or t
  misc_feature (268)..(268): n is a, c, g, or t
  misc_feature (270)..(270): n is a, c, g, or t
  misc_feature (289)..(289): n is a, c, g, or t
  misc_feature (292)..(292): n is a, c, g, or t
  misc_feature (299)..(299): n is a, c, g, or t
  misc_feature (335)..(335): n is a, c, g, or t
  misc_feature (357)..(357): n is a, c, g, or t
  misc_feature (366)..(366): n is a, c, g, or t
  misc_feature (407)..(407): n is a, c, g, or t
  misc_feature (410)..(415): n is a, c, g, or t
  misc_feature (417)..(421): n is a, c, g, or t
  misc_feature (424)..(424): n is a, c, g, or t
  misc_feature (426)..(426): n is a, c, g, or t
  misc_feature (457)..(477): n is a, c, g, or t

SEQ ID NO: 503 - DNA, 356 bp, Mus musculus
  misc_feature (91)..(110): n is a, c, g, or t
  misc_feature (126)..(126): n is a, c, g, or t
  misc_feature (171)..(172): n is a, c, g, or t
  misc_feature (174)..(182): n is a, c, g, or t
gagctagacccttttgatgtcagggacaagaacaatggcaacccagctaatactggctgaggtgggtatgcctgtttggctgaagcagcgnnnnnnnnnnnnnnnnnnnntaagatcttatacccntcttaccctcagattcctgacaggatttaataaaaaattgttaannannnnnnnnncaccctaaggatttataggaaaaatgatttttatatgaaggtttaagtttgtgatactcttaagatttttttataagattacattttaagatgaataataaaataattgccgtgtgtcaataattttgagagaattatcttggttgcttacactttggcaatatcacaagttgg

SEQ ID NO: 504 - DNA, 356 bp, Mus musculus; identical to SEQ ID NO: 503
  misc_feature (91)..(110): n is a, c, g, or t
  misc_feature (126)..(126): n is a, c, g, or t
  misc_feature (171)..(172): n is a, c, g, or t
  misc_feature (174)..(182): n is a, c, g, or t

SEQ ID NO: 505 - DNA, 535 bp, Mus musculus
  misc_feature (65)..(65): n is a, c, g, or t
  misc_feature (72)..(72): n is a, c, g, or t
  misc_feature (85)..(85): n is a, c, g, or t
  misc_feature (161)..(161): n is a, c, g, or t
  misc_feature (241)..(255): n is a, c, g, or t
  misc_feature (422)..(422): n is a, c, g, or t
  misc_feature (480)..(480): n is a, c, g, or t
  misc_feature (482)..(483): n is a, c, g, or t
  misc_feature (485)..(486): n is a, c, g, or t
  misc_feature (488)..(489): n is a, c, g, or t
  misc_feature (494)..(495): n is a, c, g, or t
agcaagaacccctacgtgtgccacacagcatcatagtgaatgtgaaaagtatgatttagggaaancaaaaancaaaaaaaaaaancaaaaaaacgaaaggaaacaaaacaggaggggctgaggacaccgctcagtgggtagagctgctacagctactgtgnaacccggggttccatcccagccatggtaaccaggcaggaggatcagaagttcagggtcaacctcagctacatacagagtnnnnnnnnnnnnnnngttatttgagacactgtctcaagaacaatcaaacaaaacccacagaatcttctctagctttagatgtggaccagggaggaagccttgttttgggggctttggtgagtctgatgtggacctcaatggtaaaagggtaaatggatgagaaaactttttttttttttttnggtaaggtgtggtaaattaatgatgtcagtttcctcccatcaaacctgaaattctcancnncnncnnaaaanngaaaggagaaaaaaaaatactctcaggtgtcacatgccta

SEQ ID NO: 506 - DNA, 535 bp, Mus musculus; identical to SEQ ID NO: 505
  misc_feature (65)..(65): n is a, c, g, or t
  misc_feature (72)..(72): n is a, c, g, or t
  misc_feature (85)..(85): n is a, c, g, or t
  misc_feature (161)..(161): n is a, c, g, or t
  misc_feature (241)..(255): n is a, c, g, or t
  misc_feature (422)..(422): n is a, c, g, or t
  misc_feature (480)..(480): n is a, c, g, or t
  misc_feature (482)..(483): n is a, c, g, or t
  misc_feature (485)..(486): n is a, c, g, or t
  misc_feature (488)..(489): n is a, c, g, or t
  misc_feature (494)..(495): n is a, c, g, or t

SEQ ID NO: 507 - DNA, 569 bp, Mus musculus
  misc_feature (36)..(186): n is a, c, g, or t
  misc_feature (293)..(323): n is a, c, g, or t
  misc_feature (339)..(339): n is a, c, g, or t
  misc_feature (351)..(351): n is a, c, g, or t
  misc_feature (376)..(376): n is a, c, g, or t
  misc_feature (379)..(379): n is a, c, g, or t
cattctgaaggacgtaccaaaccctaaccaggttgnnnnnnnnnnnnnnnnnnnnnnnnnnnnnnnnnnnnnnnnnnnnnnnnnnnnnnnnnnnnnnnnnnnnnnnnnnnnnnnnnnnnnnnnnnnnnnnnnnnnnnnnnnnnnnnnnnnnnnnnnnnnnnnnnnnnnnnnnnnnnnnnnnnnnnnggggaagctgcacgtgctgagagtcatgtttgaagtgtggaggaaccatccacagatgattgctgtgctggttgataagatgattcgtacgcagattgtcgactgtnnnnnnnnnnnnnnnnnnnnnnnnnnnnnnnagctgtctcgggactntacgaggttgtntgtgtgggaaattttgcactctacnatncgtaagatgaacaaacatgttctgaagatccagaaagagctagaagaagctaaagagaaactggcgaggcagcacaaacgacgcagtgatgacgacgacaggagcagtgacaggaaggacggtgccctggaggagcaaatagaaaggctgcaggagaaggtggaggctgctcagagtgagcagaagaacc

SEQ ID NO: 508 - DNA, 569 bp, Mus musculus; identical to SEQ ID NO: 507
  misc_feature (36)..(186): n is a, c, g, or t
  misc_feature (293)..(323): n is a, c, g, or t
  misc_feature (339)..(339): n is a, c, g, or t
  misc_feature (351)..(351): n is a, c, g, or t
  misc_feature (376)..(376): n is a, c, g, or t
  misc_feature (379)..(379): n is a, c, g, or t

SEQ ID NO: 509 - DNA, 343 bp, Mus musculus
tacgtgtcaatactctctcgatgaaactgttggcatatgctttggattactggtcaaagggtcaactgaaagcattgtttttagaacatgagggatactttggagctgttggtgcgcttcttggactgccgaatttcagctaaaacatgggccatctttactaaggaacgcctgccattcaggaagagctgatccagaaaccgcagtcattgtctgtcactgggaaccaaaggataaaagcctaattctacttgtgttcattttaaatgtcagaatggtgagctttgccgcatggaaagacctataatgggaagtatccctcactgattgatgtcctcttgta

SEQ ID NO: 510 - DNA, 343 bp, Mus musculus; identical to SEQ ID NO: 509

SEQ ID NO: 511 - DNA, 545 bp, Mus musculus
  misc_feature (185)..(185): n is a, c, g, or t
  misc_feature (276)..(276): n is a, c, g, or t
  misc_feature (312)..(312): n is a, c, g, or t
ggaaagacagacagccgccgcagtgggacgagggggcgctccctttactttgtctttataagttccttctgcctcgcctttcccttcctcttcagtctgtccatctgtctgtccttgtcctcatggtgactctggcatggtgacgtactctatttgcattatctgtggtcaccagcaaaaatgancagcggggaggatctgaaggagtccagggtaaggaagcctggcctggtgactgccttaaggcctgctctgctgtcatctgcaggtggcctntcagcagccccatccttgggaatgaaagccaacctntggctccactgtgctcgctctgccccctcctaccaaccagggctcacgtcggtgcacgcccaccgtgccctgacaaagctggtgctgtgagtgatgtttcccatacaactcaggggtgccaggcggctccccccatagtcattttaggcacatcacagtgtgggaatgaaaatggattccatggatatttaaatctgtccatttcatttttgttaatgtttcccccgatgact

SEQ ID NO: 512 - DNA, 545 bp, Mus musculus; identical to SEQ ID NO: 511
  misc_feature (185)..(185): n is a, c, g, or t
  misc_feature (276)..(276): n is a, c, g, or t
  misc_feature (312)..(312): n is a, c, g, or t

SEQ ID NO: 513 - DNA, 487 bp, Mus musculus
  misc_feature (364)..(397): n is a, c, g, or t
  misc_feature (413)..(413): n is a, c, g, or t
  misc_feature (425)..(425): n is a, c, g, or t
catctgaccttggaactagaagtgacctcaagctcagctacttggaagaagctgtgatgcacctggaccacagcgatcccatcactcgagaccacatgggctctgtcatggctcaggtgcgccagaagctcttccagttcctgcaggctgatccacacaactcacttagcaaagctgcccgccgcctcagcctaatgttacacggccttgtgacccctagcctcccttagccatttaaagagggatgaggtgatgctgaaggccagttggcaggtttaggtcaaggcagggccatgtctgctgtttccctgctcaggccttcctctctggtgtgtggagggaggtatgcagcagggctcacggnnnnnnnnnnnnnnnnnnnnnnnnnnnnnnnnnncaggcgggcccagggnacgtagtgtgcnttcttgggtcctaccatgcctgaagcgtgaccccaagatcgtgacaccacttgagttgaatt

SEQ ID NO: 514 - DNA, 487 bp, Mus musculus; identical to SEQ ID NO: 513
  misc_feature (364)..(397): n is a, c, g, or t
  misc_feature (413)..(413): n is a, c, g, or t
  misc_feature (425)..(425): n is a, c, g, or t

SEQ ID NO: 515 - DNA, 616 bp, Mus musculus
  misc_feature (55)..(56): n is a, c, g, or t
catccacagagagtgaagagtcggactgcggggagggcacggcaccaagacctcnncatccaagtgaaaccccatcctgcaacttggttttaagaaatcaaacggatcttgagaggcagcgcttcctcagagggaggaaaagcgtcagaaaattgggggtggggagggaaagcatcgtagactcctaccgtttcttgagtttatgatcagttgaaatttcttgtgttatggaaaaggtccatcctcgtggcttcgttaataagtaaaggacggttttgtaaaactgtaaagacttaaaattgccagtagtagagcccacgacgaagaagactcgaagagaaagctggttttaggacgaggtttctgtggagaacttgaccttgtcagagcaggcaaagtcttcacgtcagcgtcaacaagcgtgtatagtgtaagagggattttgtgtctcagacattgtgaatggcgaacaacataaatattgtatatagtatgtgataaatcgtgtttccaaacataccaattttctgggattttattttccatttttcaaaagttttttttttccgtcattgctttgtaattaatctattcctaagtcccaagactatgaagg

SEQ ID NO: 516 - DNA, 616 bp, Mus musculus; identical to SEQ ID NO: 515
  misc_feature (55)..(56): n is a, c, g, or t

SEQ ID NO: 517 - DNA, 505 bp, Mus musculus
  misc_feature (62)..(76): n is a, c, g, or t
  misc_feature (92)..(93): n is a, c, g, or t
  misc_feature (151)..(151): n is a, c, g, or t
  misc_feature (333)..(334): n is a, c, g, or t
  misc_feature (336)..(336): n is a, c, g, or t
  misc_feature (340)..(340): n is a, c, g, or t
  misc_feature (359)..(360): n is a, c, g, or t
  misc_feature (374)..(374): n is a, c, g, or t
  misc_feature (377)..(378): n is a, c, g, or t
  misc_feature (398)..(398): n is a, c, g, or t
  misc_feature (418)..(418): n is a, c, g, or t
  misc_feature (427)..(427): n is a, c, g, or t
  misc_feature (435)..(435): n is a, c, g, or t
  misc_feature (446)..(446): n is a, c, g, or t
  misc_feature (450)..(450): n is a, c, g, or t
cctcttatctattaggagctgtcaggtgtgttctggcggctgatttccctagcctgaagaannnnnnnnnnnnnnnactatgtacctactgnngggggtgggggtggggtatctgacctcaagtgtgctctgagcccaggttttctcgtgnggtgtcttttaccacgaaattatgacacattgcaaatcctggtattgtgatcttattctctgtacaaagaaagaagctctatgccgtgagctgtggtttaatggtcacagaatgtcagcactgctatcattcagcacgtgtaacatttttaaatttataaatattaaaattttaaacttacnntnaganttttaagttttttttgttnnaagagacccagggngtnnatactgtttaaatatttacntctattaatataactaatgnaggcatttnatttttcnaaagataactncagnatgattttagggaataaaccaaggctgtgtgtagagccagttataacctgaatat

SEQ ID NO: 518 - DNA, 505 bp, Mus musculus; identical to SEQ ID NO: 517
  misc_feature (62)..(76): n is a, c, g, or t
  misc_feature (92)..(93): n is a, c, g, or t
  misc_feature (151)..(151): n is a, c, g, or t
  misc_feature (333)..(334): n is a, c, g, or t
  misc_feature (336)..(336): n is a, c, g, or t
  misc_feature (340)..(340): n is a, c, g, or t
  misc_feature (359)..(360): n is a, c, g, or t
  misc_feature (374)..(374): n is a, c, g, or t
  misc_feature (377)..(378): n is a, c, g, or t
  misc_feature (398)..(398): n is a, c, g, or t
  misc_feature (418)..(418): n is a, c, g, or t
  misc_feature (427)..(427): n is a, c, g, or t
  misc_feature (435)..(435): n is a, c, g, or t
  misc_feature (446)..(446): n is a, c, g, or t
  misc_feature (450)..(450): n is a, c, g, or t

SEQ ID NO: 519 - DNA, 481 bp, Mus musculus
  misc_feature (76)..(113): n is a, c, g, or t
  misc_feature (185)..(205): n is a, c, g, or t
  misc_feature (383)..(383): n is a, c, g, or t
ctgcaaatttcaggtgatgatacagaagctgtagagcgagctggcgactcctgggcagagcgttgcacatcctgannnnnnnnnnnnnnnnnnnnnnnnnnnnnnnnnnnnnngttatctcaccagagtcacatagaccaaatcaaagtagacacaggtcctttgaccatgacagaaactgactnnnnnnnnnnnnnnnnnnnnngaactagacaccaagatgcaaggctcttcattttaaacatctttatttccataggtgattagcatttaaccatcaataggaagtgaaactcagggtgtgttgaattgctgtattaaaaaaaatgcaccaatcagaatagtttgtgttcaaatgaccaaaatttgttgaactataaatntgttttagttatttaaaaaagcaaaccactatgttaaattaagcttaatttttattgtattgcttataatttatttctgtcgagagaattcatatgct

SEQ ID NO: 520 - DNA, 481 bp, Mus musculus; identical to SEQ ID NO: 519
  misc_feature (76)..(113): n is a, c, g, or t
  misc_feature (185)..(205): n is a, c, g, or t
  misc_feature (383)..(383): n is a, c, g, or t

SEQ ID NO: 521 - DNA, 327 bp, Mus musculus
  misc_feature (252)..(252): n is a, c, g, or t
ctccccagggacagggacaagaggaaaacacgcatcccacactgcccaccctgtgctgcgtgtttctcaagaacagggaattaaggactgcaacttctaggtacaaggttataggagaccgccagccttcctcacgatgaccctggaggggctgggagaacacaagggacaatagcagccatatttggggctctggaatcatgtggtccgaggtgtaaataagcattctaggggcttgggtttttgtttttnttttcctgtcaggaattaattttgaaaactccttgaggaatgtccagcagaatgaggctcaaagggactgcatag

SEQ ID NO: 522 - DNA, 327 bp, Mus musculus; identical to SEQ ID NO: 521
  misc_feature (252)..(252): n is a, c, g, or t

SEQ ID NO: 523 - DNA, 81 bp, Mus musculus
aactgcgaccacaacttgcaggggtcgtgcctaacgtcgcctccgctcgacgtccctaagacaggccgactctgacgccgc

SEQ ID NO: 524 - DNA, 81 bp, Mus musculus; identical to SEQ ID NO: 523

SEQ ID NO: 525 - DNA, 606 bp, Mus musculus
  misc_feature (52)..(52): n is a, c, g, or t
  misc_feature (432)..(432): n is a, c, g, or t
  misc_feature (444)..(444): n is a, c, g, or t
  misc_feature (536)..(550): n is a, c, g, or t
  misc_feature (569)..(569): n is a, c, g, or t
  misc_feature (579)..(579): n is a, c, g, or t
tgactgtacctctgcctggactgcctgccaccagctctaggtggcggccgcntcaacatcagttcctcaaacgaactgtctgctttgaggactgatgacgaaaaactgatgccaaatttgaaagaagtgttttatttatctgcagggctacccagtttatactcaatgcctcgaaacccttaggacctctatttaataagatgaggatatgaaaccagaccacattaatttcagttaacaggctttctaagctgaacacttcgccactatcatagctgtttgactcctaggttttgtttgttttcttacggcctttgtcggtgaggagcagaggaagggagttttatatcatgaagttgccctggaggtagcaggctatacataacaggaagcgtgaatcggacaggtggagcctcggatcataggatggantacccagtttgnctgggacacaacagaaaatcatgcagttctagccactcgctagaaacaaccacaggactgtcacactttgttctgataaagctagaggcccnnnnnnnnnnnnnnngatggtgtgccttggaatntgctgtgagntacgcagtactaaccaaacaatgttgt

SEQ ID NO: 526 - DNA, 606 bp, Mus musculus; identical to SEQ ID NO: 525
  misc_feature (52)..(52): n is a, c, g, or t
  misc_feature (432)..(432): n is a, c, g, or t
  misc_feature (444)..(444): n is a, c, g, or t
  misc_feature (536)..(550): n is a, c, g, or t
  misc_feature (569)..(569): n is a, c, g, or t
  misc_feature (579)..(579): n is a, c, g, or t

SEQ ID NO: 527 - DNA, 580 bp, Mus musculus
  misc_feature (118)..(132): n is a, c, g, or t
  misc_feature (148)..(163): n is a, c, g, or t
  misc_feature (355)..(371): n is a, c, g, or t
  misc_feature (515)..(546): n is a, c, g, or t
ttacagagctctgtgacagtctatcctgatcttgctcgctttgctcaggaacaggagcccatgtatttttgctgatcgagtcgaactcggaacccccagggtctgttaggttgttttnnnnnnnnnnnnnnntcttttggggagaggnnnnnnnnnnnnnnnntccttctaccttgcgatgtggctgtgtgttgaattccgtttcaaaagatgacagctgctgcgttactcctaaaagtccacccacctccacactgagaatcacccagatgacatctccatagtagagtccagtagcagtgcacatccgccactgtccctggtacatgcctgctctgctgggactgcacatctnnnnnnnnnnnnnnnnnatctcttggggctctagtgatctcaccatcaccatgttcacatgtccaaactggtctcccccgacatacttaagacaaacaccctggaggccaggcctctgctcctaagttcaaacaaaaaaagaaaagaaataaaactgttannnnnnnnnnnnnnnnnnnnnnnnnnnnnnnntcaaattgtggaaagggtctcttcatatacatat

SEQ ID NO: 528 - DNA, 580 bp, Mus musculus; identical to SEQ ID NO: 527
  misc_feature (118)..(132): n is a, c, g, or t
  misc_feature (148)..(163): n is a, c, g, or t
  misc_feature (355)..(371): n is a, c, g, or t
  misc_feature (515)..(546): n is a, c, g, or t

SEQ ID NO: 529 - DNA, 304 bp, Mus musculus
  misc_feature (150)..(150): n is a, c, g, or t
  misc_feature (181)..(181): n is a, c, g, or t
  misc_feature (186)..(186): n is a, c, g, or t
  misc_feature (193)..(193): n is a, c, g, or t
  misc_feature (201)..(202): n is a, c, g, or t
tccacaaagtgaaatttctgagctcactatagctctgtataaaaatcagcccttacctttccagcggcatgacatgaaattccggttaccagacatgaaattcattatagaccctcttgagccaaagtatggtgggaatgtaactgaggngaaaatatgtgtgtggtgagggctaagatcnaggtncaacccngggcctgnnccagagtggggagagtggggaaatcaaagtagatgcttagttttaacttgggaatggtggcaaaccccgtggtctcttacctgtaggctcacagctaagggg

SEQ ID NO: 530 - DNA, 304 bp, Mus musculus; identical to SEQ ID NO: 529
  misc_feature (150)..(150): n is a, c, g, or t
  misc_feature (181)..(181): n is a, c, g, or t
  misc_feature (186)..(186): n is a, c, g, or t
  misc_feature (193)..(193): n is a, c, g, or t
  misc_feature (201)..(202): n is a, c, g, or t

SEQ ID NO: 531 - DNA, 85 bp, Mus musculus
  misc_feature (35)..(50): n is a, c, g, or t
ccatgcgcttcatcgtgtggcgccggttcaagtgnnnnnnnnnnnnnnnncttctgctgctcatcctgttgctgttcgtggctgt

SEQ ID NO: 532 - DNA, 85 bp, Mus musculus; identical to SEQ ID NO: 531
  misc_feature (35)..(50): n is a, c, g, or t

SEQ ID NO: 533 - DNA, 606 bp, Mus musculus
  misc_feature (30)..(45): n is a, c, g, or t
  misc_feature (81)..(81): n is a, c, g, or t
  misc_feature (97)..(97): n is a, c, g, or t
  misc_feature (99)..(105): n is a, c, g, or t
  misc_feature (108)..(111): n is a, c, g, or t
  misc_feature (114)..(115): n is a, c, g, or t
  misc_feature (117)..(119): n is a, c, g, or t
  misc_feature (121)..(124): n is a, c, g, or t
  misc_feature (145)..(160): n is a, c, g, or t
  misc_feature (162)..(162): n is a, c, g, or t
  misc_feature (164)..(164): n is a, c, g, or t
  misc_feature (166)..(184): n is a, c, g, or t
  misc_feature (260)..(279): n is a, c, g, or t
  misc_feature (388)..(388): n is a, c, g, or t
  misc_feature (401)..(401): n is a, c, g, or t
  misc_feature (406)..(406): n is a, c, g, or t
  misc_feature (410)..(410): n is a, c, g, or t
  misc_feature (421)..(421): n is a, c, g, or t
  misc_feature (430)..(430): n is a, c, g, or t
  misc_feature (451)..(451): n is a, c, g, or t
  misc_feature (455)..(455): n is a, c, g, or t
cgcttcatcgtgtggcgccggttcaagtgnnnnnnnnnnnnnnnncttctgctgctcatcctgttgctgttcgtggctgtnctcctgtactctcttncnnnnnnnttnnnnatnnannntnnnnaggccgaatgcatagtgaaannnnnnnnnnnnnnnncncnannnnnnnnnnnnnnnnnnntcacacactgatgtgtgatttcaagttcaagacgatctcaggagacttcaccaaggcacataaattcctagagggnnnnnnnnnnnnnnnnnnnnacaacaggcaacattttttatcatgttatctttaagtattaaaacatttattttctaaactttaagcctattttccgagtatttctaaggtggctggttccatttatanatcttcttttgantgtgntctncattctatgantcgtttggncagttagtgaaatgaatttgnaatntcttgtatcttaacgtcatatatcctatttgtaatcaagaggaaagactacattaagaagatagggtgcatagttagagcagttcttattggtgcccacaaccattgttgtggtattttgtatggacaaatgtcatgagactctttgcaac

SEQ ID NO: 534 - DNA, 606 bp, Mus musculus; identical to SEQ ID NO: 533
  misc_feature (30)..(45): n is a, c, g, or t
  misc_feature (81)..(81): n is a, c, g, or t
  misc_feature (97)..(97): n is a, c, g, or t
  misc_feature (99)..(105): n is a, c, g, or t
  misc_feature (108)..(111): n is a, c, g, or t
  misc_feature (114)..(115): n is a, c, g, or t
  misc_feature (117)..(119): n is a, c, g, or t
  misc_feature (121)..(124): n is a, c, g, or t
  misc_feature (145)..(160): n is a, c, g, or t
  misc_feature (162)..(162): n is a, c, g, or t
  misc_feature (164)..(164): n is a, c, g, or t
  misc_feature (166)..(184): n is a, c, g, or t
  misc_feature (260)..(279): n is a, c, g, or t
  misc_feature (388)..(388): n is a, c, g, or t
  misc_feature (401)..(401): n is a, c, g, or t
  misc_feature (406)..(406): n is a, c, g, or t
  misc_feature (410)..(410): n is a, c, g, or t
  misc_feature (421)..(421): n is a, c, g, or t
  misc_feature (430)..(430): n is a, c, g, or t
  misc_feature (451)..(451): n is a, c, g, or t
  misc_feature (455)..(455): n is a, c, g, or t

SEQ ID NO: 535 - DNA, 533 bp, Mus musculus
  misc_feature (297)..(297): n is a, c, g, or t
  misc_feature (300)..(300): n is a, c, g, or t
  misc_feature (303)..(303): n is a, c, g, or t
  misc_feature (305)..(305): n is a, c, g, or t
  misc_feature (311)..(311): n is a, c, g, or t
  misc_feature (314)..(314): n is a, c, g, or t
  misc_feature (320)..(320): n is a, c, g, or t
  misc_feature (334)..(348): n is a, c, g, or t
  misc_feature (353)..(353): n is a, c, g, or t
  misc_feature (355)..(355): n is a, c, g, or t
  misc_feature (361)..(361): n is a, c, g, or t
  misc_feature (406)..(406): n is a, c, g, or t
  misc_feature (464)..(464): n is a, c, g, or t
  misc_feature (466)..(466): n is a, c, g, or t
gaatctctaaaaacttgaaatggtcacatgtccccgtgggatttttgactgatatcggagctgaagggattttcagtcatttgatcactttagcaatgatactctgatgaatcttctccatgaatttggatttttggtttttacatttatctgttgatctatttgaggtctttttatgtttatcaaacttattcttaagtttaaaaaattaaaagggtattttaagattttcaaatttgctgatcttcaaagtgcttataatagagcagttcctgctaccagtcctgtattctgttnagntancnaaattntcnttgganttgagtttcccacnnnnnnnnnnnnnnntgaantnttttgntatattttaaaatattttttggaagagctgctaattttattttangaaacaaagttgtaaaaatatgcctcctttttaaaaataaataaataaataacccttntntccaggccgaataacccggcgtcaccatgcacaggtcagggctcaaagggagcctccgtgcaggtgc

SEQ ID NO: 536 - DNA, 533 bp, Mus musculus; identical to SEQ ID NO: 535
  misc_feature (297)..(297): n is a, c, g, or t
  misc_feature (300)..(300): n is a, c, g, or t
  misc_feature (303)..(303): n is a, c, g, or t
  misc_feature (305)..(305): n is a, c, g, or t
  misc_feature (311)..(311): n is a, c, g, or t
  misc_feature (314)..(314): n is a, c, g, or t
  misc_feature (320)..(320): n is a, c, g, or t
  misc_feature (334)..(348): n is a, c, g, or t
  misc_feature (353)..(353): n is a, c, g, or t
  misc_feature (355)..(355): n is a, c, g, or t
  misc_feature (361)..(361): n is a, c, g, or t
  misc_feature (406)..(406): n is a, c, g, or t
  misc_feature (464)..(464): n is a, c, g, or t
  misc_feature (466)..(466): n is a, c, g, or t

SEQ ID NO: 537 - DNA, 522 bp, Mus musculus
  misc_feature (31)..(31): n is a, c, g, or t
  misc_feature (337)..(337): n is a, c, g, or t
  misc_feature (351)..(351): n is a, c, g, or t
  misc_feature (383)..(383): n is a, c, g, or t
  misc_feature (395)..(395): n is a, c, g, or t
  misc_feature (434)..(434): n is a, c, g, or t
  misc_feature (465)..(465): n is a, c, g, or t
gcgtttgtcaggttggccttctctagcgacntaccaggatccttctgcgtttctgtacatacagcagacctgatggtctctggttcctgctggttctggatccccgttttctctgcagttccttatttccttgcctttgtccacaccttatggagtctgtattatgccaggcttgatttgaaaatggtgctgtagtcaggtctgtaaagtcctttaccacgtctcacctctgctaggatgccatcagtacaccggcaatctctgctgctgtgggctggtccagcagagcctgctgccccccatgggggtcatacccagtggaaactcaagctcactnacttgtgtattaanaactagagaattggtaagaaaagtgtgtgttntagacttgaatntctacataaatattccccccaaagctttattttcttggntcagaggtcaaaatttatgaaaataggatgngtaaataaatggattaaataaaatattataattcacaaggtggcaaactttaaccaa

SEQ ID NO: 538 - DNA, 522 bp, Mus musculus; identical to SEQ ID NO: 537
  misc_feature (31)..(31): n is a, c, g, or t
  misc_feature (337)..(337): n is a, c, g, or t
  misc_feature (351)..(351): n is a, c, g, or t
  misc_feature (383)..(383): n is a, c, g, or t
  misc_feature (395)..(395): n is a, c, g, or t
  misc_feature (434)..(434): n is a, c, g, or t
  misc_feature (465)..(465): n is a, c, g, or t

SEQ ID NO: 539 - DNA, 483 bp, Mus musculus
  misc_feature (36)..(58): n is a, c, g, or t
  misc_feature (64)..(64): n is a, c, g, or t
  misc_feature (78)..(78): n is a, c, g, or t
  misc_feature (92)..(93): n is a, c, g, or t
  misc_feature (97)..(98): n is a, c, g, or t
  misc_feature (238)..(260): n is a, c, g, or t
ttcctgcttgtctggtggtgtgtgctggagtgacannnnnnnnnnnnnnnnnnnnnnnctgtgnccctgaggcagganaccatatggttagnnacanngaatgttcctagcccacttctggatggccagtgtctaataggtccttcctaacttttacggacatagctcctagaatctctggaacctcctgcctgccgctgggcctctgctggacctcctggcccgcagcccctgttcnnnnnnnnnnnnnnnnnnnnnnntcttcttgctgcttccaccagtgggttccggctctggtccagggcatgtgggaacttgactgtctggctcctcatgactgtgatgtggtctataaacaaatctacttaagctcgctgtctctgaaaactgccctgctctaggacttccagtggtcctctggaactcacccttaaaaatccaaagcggattcagagctctcgcttctccatctgctctgcagag

SEQ ID NO: 540 - DNA, 483 bp, Mus musculus; identical to SEQ ID NO: 539
  misc_feature (36)..(58): n is a, c, g, or t
  misc_feature (64)..(64): n is a, c, g, or t
  misc_feature (78)..(78): n is a, c, g, or t
  misc_feature (92)..(93): n is a, c, g, or t
  misc_feature (97)..(98): n is a, c, g, or t
  misc_feature (238)..(260): n is a, c, g, or t

SEQ ID NO: 541 - DNA, 618 bp, Mus musculus
  misc_feature (61)..(62): n is a, c, g, or t
  misc_feature (323)..(323): n is a, c, g, or t
  misc_feature (331)..(387): n is a, c, g, or t
  misc_feature (389)..(389): n is a, c, g, or t
  misc_feature (393)..(405): n is a, c, g, or t
  misc_feature (408)..(409): n is a, c, g, or t
  misc_feature (412)..(412): n is a, c, g, or t
  misc_feature (414)..(414): n is a, c, g, or t
  misc_feature (417)..(420): n is a, c, g, or t
  misc_feature (423)..(424): n is a, c, g, or t
  misc_feature (506)..(528): n is a, c, g, or t
cacgtctcgtttgtatatgttttgctgtgaatgaagttcctttaaggacaaagggaagtgnnctgtgcttcatttgagcatatctgccttggcttagcatctgcttattctaagacacgctccttcacccgtcccagagactcacgttggacatgaaatacttttatcacgttcctgtgagtaaagcaacccgggattttcctgagttcccaattaaacctgtacaggttttcacattttaaatccaatttaagcaaagagggaaaggacacaggggaaagaagcccctttaaaactcattcagagaataaaccatgtttgcnttttcatnnnnnnnnnnnnnnnnnnnnnnnnnnnnnnnnnnnnnnnnnnnnnnnnnnnnnnnnncntttnnnnnnnnnnnnnttnnttncnttnnnnggnntcaggtgaaggaagcccatctgtgccggagagctctatatgccttgaactagcctagcctctgtcccagttgtgatgacagnnnnnnnnnnnnnnnnnnnnnnnagctacagttgtctgcctctgagtcctcatgctgcatattcctgctttccagtctgttcctactgagtgtgatgtcacatctctgctctc

SEQ ID NO: 542 - DNA, 618 bp, Mus musculus; identical to SEQ ID NO: 541
  misc_feature (61)..(62): n is a, c, g, or t
  misc_feature (323)..(323): n is a, c, g, or t
  misc_feature (331)..(387): n is a, c, g, or t
  misc_feature (389)..(389): n is a, c, g, or t
  misc_feature (393)..(405): n is a, c, g, or t
  misc_feature (408)..(409): n is a, c, g, or t
  misc_feature (412)..(412): n is a, c, g, or t
  misc_feature (414)..(414): n is a, c, g, or t
  misc_feature (417)..(420): n is a, c, g, or t
  misc_feature (423)..(424): n is a, c, g, or t
  misc_feature (506)..(528): n is a, c, g, or t

SEQ ID NO: 543 - DNA, 398 bp, Mus musculus
  misc_feature (36)..(36): n is a, c, g, or t
  misc_feature (51)..(51): n is a, c, g, or t
  misc_feature (54)..(54): n is a, c, g, or t
  misc_feature (57)..(57): n is a, c, g, or t
  misc_feature (60)..(60): n is a, c, g, or t
  misc_feature (62)..(62): n is a, c, g, or t
  misc_feature (197)..(197): n is a, c, g, or t
  misc_feature (295)..(295): n is a, c, g, or t
ttccagaggagcagaggctacaaagaaccgaggttntaaagaagcatatanagnatnttntngatagaatgattgctgaagaggagagcctgagggaaaggctgctcaaaagcatatccatctgtcagaaggagctgagtaccctgtgcagtgagctacaagtgaagccatttcaggaagaaaaagatacaaccatnttgcaactagaaaaagatttgcgcactcaagtagaattgatgagaaaacagaaaaaggagagaaagcaggaactgaagctacttcaggaacaggagcnagaactccgtgacatcctctgtatgccgccctgtgatgtggacagcacctctgtccccaccttagaagagctgaagctattccgacagcgtgtggcaacgctc

SEQ ID NO: 544 - DNA, 398 bp, Mus musculus; identical to SEQ ID NO: 543
  misc_feature (36)..(36): n is a, c, g, or t
  misc_feature (51)..(51): n is a, c, g, or t
  misc_feature (54)..(54): n is a, c, g, or t
  misc_feature (57)..(57): n is a, c, g, or t
  misc_feature (60)..(60): n is a, c, g, or t
  misc_feature (62)..(62): n is a, c, g, or t
  misc_feature (197)..(197): n is a, c, g, or t
  misc_feature (295)..(295): n is a, c, g, or t

SEQ ID NO: 545 - DNA, 179 bp, Mus musculus
cacttgtgggttgattgtgtcttacacagatttgcactttgagtaggtgaaaacagaaaactagaattcaaccctccaaacctacctaagagcctggtgtgtgtgtgcttctgttccgttagtgagctgaggccagaacagctgtgctcaaaaaagaaccttcccaagcattggtccac

SEQ ID NO: 546 - DNA, 179 bp, Mus musculus; identical to SEQ ID NO: 545

SEQ ID NO: 547 - DNA, 501 bp, Mus musculus
  misc_feature (139)..(155): n is a, c, g, or t
  misc_feature (299)..(323): n is a, c, g, or t
  misc_feature (331)..(332): n is a, c, g, or t
ctttctcagtttgaatatgaagaacattcatgttttaatccatgtcagatactacattgttttttgttctcaaacatcaggtagacactaaactgctttcccttgtaactcagcaagagtctgtgatgtgttctgtctnnnnnnnnnnnnnnnnntgttactgtgaatatttaaaaggaacatgtgcatattatactggtatttaatatttcgtgactttgactttggttttcctcatcaaataggtaaattatgcaagtattatcttgtataaaatgaaataatatttattcctaatnnnnnnnnnnnnnnnnnnnnnnnnnaaaaacanntgtgcattttatatttttataataattttcttttgccattgatttagatctacttaccacatcacaatataaagttacattcttataccatgttctctgcttaatttgaggccttttgttgagttaatacctatgagtttggattgtgtgatgttttcttacagtcagc

SEQ ID NO: 548 - DNA, 501 bp, Mus musculus; identical to SEQ ID NO: 547
  misc_feature (139)..(155): n is a, c, g, or t
  misc_feature (299)..(323): n is a, c, g, or t
  misc_feature (331)..(332): n is a, c, g, or t

SEQ ID NO: 549 - DNA, 418 bp, Mus musculus
  misc_feature (77)..(77): n is a, c, g, or t
  misc_feature (180)..(196): n is a, c, g, or t
  misc_feature (214)..(214): n is a, c, g, or t
  misc_feature (254)..(268): n is a, c, g, or t
  misc_feature (327)..(351): n is a, c, g, or t
gcaaactaatctcactagaatatggaacagaggcaaaaataaaaataccagtgacttctgtgtattcagctccactnagaagtggaaggaacatagagagagtgtccttctacctaggattttccattgagggtcctctggcatatggcataaaagtgatctaaggaggtatattcgttnnnnnnnnnnnnnnnnnatctatcattgtacttantctttctagcccatagagtgcatttttggcttaattatannnnnnnnnnnnnnntctttttctctgtatcagttatgggaaactttgtaggacaagaaatatgtccataccannnnnnnnnnnnnnnnnnnnnnnnngctattccatatcctcaatttgcattcccaaacagacatatttggctcatcaataaaacatctgttg

SEQ ID NO: 550 - DNA, 418 bp, Mus musculus; identical to SEQ ID NO: 549
  misc_feature (77)..(77): n is a, c, g, or t
  misc_feature (180)..(196): n is a, c, g, or t
  misc_feature (214)..(214): n is a, c, g, or t
  misc_feature (254)..(268): n is a, c, g, or t
  misc_feature (327)..(351): n is a, c, g, or t

SEQ ID NO: 551 - DNA, 337 bp, Mus musculus
aacgatgcagctctggggtctacaagtctggtatgcatctgtgtacattgtgaaaatgccatggactgcatagtggtacatgagggatacagggaatgagagtattatttgatttattattaatgtcttctttcactttcctcttcttgcagccagaatagcagaattttcatacaagcatcatgaattctatgagaaagtaggaaataaatatccactgtctggccttcggagcacatcttaagctacctacattttctcttttccactttgcttttatcattcttaaaagaaccttcttgtttatcttcattgggctttcagacactaccaaatt

SEQ ID NO: 552 - DNA, 337 bp, Mus musculus; identical to SEQ ID NO: 551

SEQ ID NO: 553 - DNA, 72 bp, Mus musculus
ctaaaagttcatctccatgtggtccctgtttgtagcaatggaatattagcattccatgaggtcattggttga

SEQ ID NO: 554 - DNA, 282 bp, Mus musculus
  misc_feature (112)..(112): n is a, c, g, or t
gataccactcatcaagaagttactgaaaaaagtgtcaaccttcctcctctctggtgtcttcagttatcaacgatgacaaatttcaataagacccagtgaaacacaaaacatnatatagaaatgcacttctaggattgggtccccattactgtttctaggcacagttctggattagaacaaacacatgatcagactagccttgtcccttatttttctggccaggttcacagggagttgccacaggatagaaagtaaaatgtaaagtctaaatgcccaaaggct

SEQ ID NO: 555 - DNA, 282 bp, Mus musculus; identical to SEQ ID NO: 554
  misc_feature (112)..(112): n is a, c, g, or t

SEQ ID NO: 556 - DNA, 574 bp, Mus musculus
  misc_feature (57)..(57): n is a, c, g, or t
  misc_feature (62)..(63): n is a, c, g, or t
  misc_feature (66)..(66): n is a, c, g, or t
  misc_feature (84)..(84): n is a, c, g, or t
  misc_feature (87)..(87): n is a, c, g, or t
  misc_feature (92)..(92): n is a, c, g, or t
  misc_feature (96)..(96): n is a, c, g, or t
  misc_feature (100)..(100): n is a, c, g, or t
  misc_feature (102)..(102): n is a, c, g, or t
ggctacctcacactctaattggaaactgattttcagatactacagcatgaattttanttaannatnccctcagaaaattagganctnaacancatngtgntncatttttagtaattcattttcagcagagcttttcttctactgtgggccaaatgtgcataaggcagagaataggaacctgcctgtctcctcactgttaggtcacagtagtgtttgcagcttatcccctatgcctgcatcaccatcacttgtgttgtttgttgctctgttcctttgcatctttatgtgaaatcaccttgtcatagtccatcaacatgtatgcgctctcttcctctatgtgataaattgattatcagctggataggttcgagagtcatttaggagacagatttctgggcacatatgtaaaggagtagttttaggttgggttaaataaggtgggaagacccaccctaagagtgaaccagtaccatttaatgggctagggtcccagactcagtaaaaagaataaagcaagctgagcaccaaacaccagccttttttttctctgctttctgactatgaattcaaagtg

SEQ ID NO: 557 - DNA, 574 bp, Mus musculus; identical to SEQ ID NO: 556
  misc_feature (57)..(57): n is a, c, g, or t
  misc_feature (62)..(63): n is a, c, g, or t
  misc_feature (66)..(66): n is a, c, g, or t
  misc_feature (84)..(84): n is a, c, g, or t
  misc_feature (87)..(87): n is a, c, g, or t
  misc_feature (92)..(92): n is a, c, g, or t
  misc_feature (96)..(96): n is a, c, g, or t
  misc_feature (100)..(100): n is a, c, g, or t
  misc_feature (102)..(102): n is a, c, g, or t

SEQ ID NO: 558 - DNA, 470 bp, Mus musculus
  misc_feature (147)..(182): n is a, c, g, or t
  misc_feature (340)..(340): n is a, c, g, or t
gaaagtcacagacaagttcaccgagagtgtctatgtccttgccaacgagccgtcagtggccctgtaccggctacaggaacatgtgcgccgttcactgccagagctggcccagcacaaggctgacatgcagagatgggaagagcagannnnnnnnnnnnnnnnnnnnnnnnnnnnnnnnnnnngtgctgtgaagagcttggtggacagcagcgtgtacttccgtagtgtggaaggcctgctcaaacaggccatcagtatccgggaccacatgaacaccagtgcccaaggccacagccaggagaaactgtcccctcctccttccctggcctgaccctgaccntggaagactcagggctacctgcttccccacccaggcctggataccacattgaagactcaccaagaactgaagacctagcaagtggccagtgcctgctgcctactgattctgccataattgtctaccttgg

SEQ ID NO: 559 - DNA, 470 bp, Mus musculus; identical to SEQ ID NO: 558
  misc_feature (147)..(182): n is a, c, g, or t
  misc_feature (340)..(340): n is a, c, g, or t

SEQ ID NO: 560 - DNA, 268 bp, Mus musculus
  misc_feature (138)..(138): n is a, c, g, or t
  misc_feature (212)..(212): n is a, c, g, or t
  misc_feature (223)..(223): n is a, c, g, or t
  misc_feature (235)..(235): n is a, c, g, or t
  misc_feature (237)..(237): n is a, c, g, or t
agagacccggaagatgatcagcacttggacctcagtgtgggtgaagatctgtgccagctgggcggggctgttcctctacctgtggaccctagtggcacccctgctcctgcccaacagagacttcagctgagaatgccntgctgcctgcctacctggtgccttggggctcaacaagggtcagcccacccttggccacagctatctgctctctntccaggacccngctcaagtcagngnttctccattctcagtgcctccagggtctgtg

SEQ ID NO: 561 - DNA, 268 bp, Mus musculus; identical to SEQ ID NO: 560
  misc_feature (138)..(138): n is a, c, g, or t
  misc_feature (212)..(212): n is a, c, g, or t
  misc_feature (223)..(223): n is a, c, g, or t
  misc_feature (235)..(235): n is a, c, g, or t
  misc_feature (237)..(237): n is a, c, g, or t

SEQ ID NO: 562 - DNA, 348 bp, Mus musculus
  misc_feature (67)..(67): n is a, c, g, or t
  misc_feature (71)..(71): n is a, c, g, or t
  misc_feature (144)..(159): n is a, c, g, or t
  misc_feature (163)..(164): n is a, c, g, or t
  misc_feature (225)..(250): n is a, c, g, or t
  misc_feature (305)..(323): n is a, c, g, or t
ctctgcagcccgtgtcgacggaggtgttgtctccaggaagcatcatggaaaggcgtggtggtgcacnaggnccttcaggatgcctgcgcctggtgacggctgcgctcaggttctgggcctgactcggaagggtgcctgtgagcnnnnnnnnnnnnnnnngcanntcagtggaccatcagtgccaacccgtcctgtaccctggctgaggggtgtgctaagtggcannnnnnnnnnnnnnnnnnnnnnnnnngtggcacaaaatcaccatcgaaagaaagggccttcgggatgcctctatctggttnnnnnnnnnnnnnnnnnnnattgccctgtagtgccagagagaac

SEQ ID NO: 563 - DNA, 348 bp, Mus musculus; identical to SEQ ID NO: 562
  misc_feature (67)..(67): n is a, c, g, or t
  misc_feature (71)..(71): n is a, c, g, or t
  misc_feature (144)..(159): n is a, c, g, or t
  misc_feature (163)..(164): n is a, c, g, or t
  misc_feature (225)..(250): n is a, c, g, or t
  misc_feature (305)..(323): n is a, c, g, or t

SEQ ID NO: 564 - DNA, 195 bp, Mus musculus
tcaggctgaccttggactcatagatttctgcctgcctcttcttcccaagtgctaaatttaaaggcatgagtgttacctgttcagttcattagacattaatatatgttctctctatcttgggactatcataacatcttagtggtcaggaaatgaagacaaagaacaaaaactccgcttacagatcttaaaagaagt

SEQ ID NO: 565 - DNA, 195 bp, Mus musculus; identical to SEQ ID NO: 564

SEQ ID NO: 566 - DNA, 564 bp, Mus musculus
  misc_feature (26)..(46): n is a, c, g, or t
  misc_feature (61)..(61): n is a, c, g, or t
  misc_feature (63)..(64): n is a, c, g, or t
  misc_feature (66)..(69): n is a, c, g, or t
  misc_feature (136)..(150): n is a, c, g, or t
  misc_feature (214)..(228): n is a, c, g, or t
  misc_feature (238)..(310): n is a, c, g, or t
  misc_feature (399)..(399): n is a, c, g, or t
  misc_feature (404)..(404): n is a, c, g, or t
  misc_feature (406)..(406): n is a, c, g, or t
  misc_feature (408)..(408): n is a, c, g, or t
  misc_feature (458)..(458): n is a, c, g, or t
tgtacattgcactgacctccctggannnnnnnnnnnnnnnnnnnnntgtggccctgctgcncnngnnnnagacatcatacccacccacacactacatccggagagtgccccaaaggaagatccactacttcacagnnnnnnnnnnnnnnnagctgctactgctctgtgccttcggcatgagctccctgccctacatgaagatggtctttccccnnnnnnnnnnnnnnntgattccaannnnnnnnnnnnnnnnnnnnnnnnnnnnnnnnnnnnnnnnnnnnnnnnnnnnnnnnnnnnnnnnnnnnnnnnnacctgcgccacccccccccccattcttcaggcctgctctgtggcaacatatggggaggtatgagctggctgtggctctggcccatcctnattgntntnttatagcctaaaggcccttggcactgtggttttcaaaggtgtgtgctcantcctcaccctgttaacattcagtttggggtcagaaacactgtcgggtggggctaagaagagtggatattcttttgataaaagagttgatgcccaggagagagccca

SEQ ID NO: 567 - DNA, 564 bp, Mus musculus; identical to SEQ ID NO: 566
  misc_feature (26)..(46): n is a, c, g, or t
  misc_feature (61)..(61): n is a, c, g, or t
  misc_feature (63)..(64): n is a, c, g, or t
  misc_feature (66)..(69): n is a, c, g, or t
  misc_feature (136)..(150): n is a, c, g, or t
  misc_feature (214)..(228): n is a, c, g, or t
  misc_feature (238)..(310): n is a, c, g, or t
  misc_feature (399)..(399): n is a, c, g, or t
  misc_feature (404)..(404): n is a, c, g, or t
  misc_feature (406)..(406): n is a, c, g, or t
  misc_feature (408)..(408): n is a, c, g, or t
  misc_feature (458)..(458): n is a, c, g, or t

SEQ ID NO: 568 - DNA, 490 bp, Mus musculus
  misc_feature (50)..(50): n is a, c, g, or t
  misc_feature (52)..(52): n is a, c, g, or t
  misc_feature (69)..(69): n is a, c, g, or t
  misc_feature (262)..(262): n is a, c, g, or t
  misc_feature (268)..(268): n is a, c, g, or t
  misc_feature (362)..(362): n is a, c, g, or t
  misc_feature (423)..(423): n is a, c, g, or t
  misc_feature (426)..(426): n is a, c, g, or t
  misc_feature (428)..(428): n is a, c, g, or t
  misc_feature (433)..(433): n is a, c, g, or t
  misc_feature (435)..(435): n is a, c, g, or t
  misc_feature (444)..(444): n is a, c, g, or t
ttcgtcgacaagcacgaacctgaacaaaggaagaaaataaagaggaggananccaagccatctacgctncagtggatgatggggatgctagtgccgagtgagacagaggctggactgtgataaatgtaggggtgggatttccagaccctgtttttagggcagaatttctgatttattactggactttgtaataatgaaatgatggaattttggttataagctctgtatttagatgtatgtttatatgattcagatatagacntattanatttcatatgagatttgattgatgaccatttttaagacattcacttccatagttttcagcacttagtacacatgaattttgagaaacactgttntctaagatgggactataaagattttgtaaatacattaaatgccacttaattgctgaaattntcntnttggntnttgtatatnacattttgactgaatttttatgtaactttggtacctatattcaagt

SEQ ID NO: 569 - DNA, 490 bp, Mus musculus; identical to SEQ ID NO: 568
  misc_feature (50)..(50): n is a, c, g, or t
  misc_feature (52)..(52): n is a, c, g, or t
  misc_feature (69)..(69): n is a, c, g, or t
  misc_feature (262)..(262): n is a, c, g, or t
  misc_feature (268)..(268): n is a, c, g, or t
  misc_feature (362)..(362): n is a, c, g, or t
  misc_feature (423)..(423): n is a, c, g, or t
  misc_feature (426)..(426): n is a, c, g, or t
  misc_feature (428)..(428): n is a, c, g, or t
  misc_feature (433)..(433): n is a, c, g, or t
  misc_feature (435)..(435): n is a, c, g, or t
  misc_feature (444)..(444): n is a, c, g, or t

SEQ ID NO: 570 - DNA, 460 bp, Mus musculus
  misc_feature (78)..(78): n is a, c, g, or t
  misc_feature (368)..(387): n is a, c, g, or t
  misc_feature (406)..(422): n is a, c, g, or t
ctgttgtctgcatttatgcttccccctaattatattggaagcttttggaacttgcacattcagtgtttataaaggggntgtataatgagtttttcctatgactttgctttagtgtttagtcataagaaagtggtaagaactagactctgttgataaaacatggttactattgcatatttgttatgcttcaggtaatgcagtgtaaatcattaaacacatttaatgatgaattatttgaatttatattatctgtaacttgggaaattttgtagtccttaaaagagacccagttttcaagttctatttttgaccaccttcaaatatactccactacccactgtatattagaatctgtgtagaagtagttnnnnnnnnnnnnnnnnnnnnatatatcaaaacaaatacnnnnnnnnnnnnnnnnnggtagtagaatggtttgcctagctagtatgtggaaggc

SEQ ID NO: 571 - DNA, 460 bp, Mus musculus; identical to SEQ ID NO: 570
  misc_feature (78)..(78): n is a, c, g, or t
  misc_feature (368)..(387): n is a, c, g, or t
  misc_feature (406)..(422): n is a, c, g, or t

SEQ ID NO: 572 - DNA, 500 bp, Mus musculus
  misc_feature (26)..(26): n is a, c, g, or t
  misc_feature (333)..(333): n is a, c, g, or t
  misc_feature (425)..(425): n is a, c, g, or t
  misc_feature (427)..(427): n is a, c, g, or t
  misc_feature (429)..(429): n is a, c, g, or t
  misc_feature (432)..(432): n is a, c, g, or t
ctatattcattgtacaggctttggcnatcataatcaccatgatattaacacatgtgcaaaaatacccactgaatatgcttgaagaagtataaattgtgtttggaaatcaatgcaacattaaaaaatcatttgatataaaaacgaaataatcagaagcatggaagcccacgtgtttaatagaagccaattgctgactctggggtgacagctgcatgcatgtccctggtcatgttgcacttctccttgagttttgactgaagtagcgtgtgctccaccacaccgattctaatgtccatctgaacagtttcttgcttcagcttggttaagctctgncttaatcttcaccaaaggagtgccgtccgtcatgctgctgcccttctcttccatttcttgctttaccttttctaattcttctgtaacctcananangantctggtccgttcagttactccgccattgccctgctggtagcgctcccttgcctcacttagctgggctt

SEQ ID NO: 573 - DNA, 500 bp, Mus musculus; identical to SEQ ID NO: 572
  misc_feature (26)..(26): n is a, c, g, or t
  misc_feature (333)..(333): n is a, c, g, or t
  misc_feature (425)..(425): n is a, c, g, or t
  misc_feature (427)..(427): n is a, c, g, or t
  misc_feature (429)..(429): n is a, c, g, or t
  misc_feature (432)..(432): n is a, c, g, or t

SEQ ID NO: 574 - DNA, 291 bp, Mus musculus
  misc_feature (147)..(253): n is a, c, g, or t
aagtcttatttgcaccttgtttggttgtgaaatgaaataccaagatttaggtccaggctaagtgtagtctattcacatgggtcaaataggctgcttggaaattacagagtgtgtaaactcagtgctattcatgttcttctggagctnnnnnnnnnnnnnnnnnnnnnnnnnnnnnnnnnnnnnnnnnnnnnnnnnnnnnnnnnnnnnnnnnnnnnnnnnnnnnnnnnnnnnnnnnnnnnnnnnnnnnnnnnnntctgtataggtgagtccactatgggttaacttgtgcta

SEQ ID NO: 575 - DNA, 291 bp, Mus musculus; identical to SEQ ID NO: 574
  misc_feature (147)..(253): n is a, c, g, or t

SEQ ID NO: 576 - DNA, 384 bp, Mus musculus
gacgacagctccagttagagccgagtggcatggctgccctgctcacctctgacagactctcatctctttggggtttgaagtcagatgtctgtttttctagtcagaagcatcctgtttgtccatcaagaaggggtgtttatttaattccccagtgggtttcacaggttgtctaacctccaggtccctggttcaggagtccagtgtagcatccatcgttgactaggatgaacatggctgggctgcagtgcagtgcagtgcaggtgccctagctgggccttggggttttgaaactaaaatttaggcttataatagctttgtaaataaatctgtttcagagttttgcctcagctacctttttcctcactttagatgtgattattcaag

SEQ ID NO: 577 - DNA, 384 bp, Mus musculus; identical to SEQ ID NO: 576

SEQ ID NO: 578 - DNA, 407 bp, Mus musculus
  misc_feature (88)..(88): n is a, c, g, or t
acgaggaccggtctggccggctccattgacacctcatctgaccctgaactctgatcttacctgggcagaactgctccaaggagcattngacgtaccagtgtgacttaccagatggactgatccaccctgaaggtccctgagactcagaggacccaagaaagggtggtagcaaccaagtggggctcccttttccctccccaaatggacatatggacagtgcaggggacagagaccttccataaaggagggagcccccaagagacactggtgaagccccagatacccagagtactgtgccaaggagccaagagtgctctgaccagacccactgctcactgccacaggaaggagaggtccttccattgctttcccaactcatacctgcttttgccccatgaataaagaga

SEQ ID NO: 579 - DNA, 407 bp, Mus musculus; identical to SEQ ID NO: 578
  misc_feature (88)..(88): n is a, c, g, or t

SEQ ID NO: 580 - DNA, 431 bp, Mus musculus
  misc_feature (176)..(176): n is a, c, g, or t
  misc_feature (214)..(214): n is a, c, g, or t
agcagtcaagatcctttcttggatccgaatttttgtggggtatctatccacagactgtctctctttccccttgctttgtttggactaaggcagaacttatctttatattgatttttttttcctttttgaggcatagcactcataagttcttttgatgccctctagagtaactggcnattttctagtactgcctttgaaaagccaattgattcgnttgtctaggacgctttcctctctttccaaaatggttgtcatggcttggtcagctgtgcgacataggcatcgggaagagggcatactgggcatgacatattcagactattgtctccagagcgtgtgtcagtactggaaatgtggccagttccagtcatttcaagattcaggggtttcaagttttggaattattgctgaaatccttaaccttagtcctg

SEQ ID NO: 581 - DNA, 431 bp, Mus musculus; identical to SEQ ID NO: 580
  misc_feature (176)..(176): n is a, c, g, or t
  misc_feature (214)..(214): n is a, c, g, or t

SEQ ID NO: 582 - DNA, 506 bp, Mus musculus
  misc_feature (139)..(155): n is a, c, g, or t
  misc_feature (209)..(209): n is a, c, g, or t
  misc_feature (377)..(392): n is a, c, g, or t
tctgttggatttgtacctcagaggaagacaagtggctggtcttctgggactcttcttctcaccagagggagaaatgccggcagcaactgcaagaagcccagtccttcggtgcccacagcccagagcacacactgctgtnnnnnnnnnnnnnnnnngcagaaaggtcaccatgttcttccttacctcagtttacctgcagcccttgctgnagtgcagatgcccaccctgtaccaggtcaggccggcagatgcttcatccatgcctcaaggtctacgccaacatgcttctcacgtctcttcccctccccaccccccttcccaagcactaggcttgttgtttaatggagcccaaccaataatcatgtgtcttcagggttnnnnnnnnnnnnnnnntaagcaaatcagtcttcaggagaaacggggtggtgtggataaggctggaagaaatggcaggtagtggagagtgttggggtgttcgatggaagacaaaaacatgggccgttctct

SEQ ID NO: 583 - DNA, 506 bp, Mus musculus; identical to SEQ ID NO: 582
  misc_feature (139)..(155): n is a, c, g, or t
  misc_feature (209)..(209): n is a, c, g, or t
  misc_feature (377)..(392): n is a, c, g, or t

SEQ ID NO: 584 - DNA, 388 bp, Mus musculus
gagcaagatctagtgcgcttttgtttgtttgttttgttttattttttgattttgaatatatatatatatatcatagcttaagctgttttaaaacaaaggccttagactaattttcggtttcctttcttgaaataagctaatggcttgtttgtgtaaagcttttttattaaaagaaaaattttaaaaatcttgtacctagcacagtattgttatagaatttccatgtaacattttctatggtagtttaagtctgtcggtttcttaattgtgaagacattaacagttggctccggccctttactgtaccatacctgcgtcactcgagtcgccctgctgtctgcagacacatcggtatcagttcttctgtcattcgacattcaggcccgca

SEQ ID NO: 585 - DNA, 388 bp, Mus musculus; identical to SEQ ID NO: 584

SEQ ID NO: 586 - DNA, 232 bp, Mus musculus
  misc_feature (59)..(59): n is a, c, g, or t
tattggaaaccaaagcaggactaattggtggccgccactgtgaatgtgtagggcttgcntggtgacactgtacttcctttagcaacagcttgtgtgtctggcatggtatttacaggcagatataagacgagctggcaggagtggcacagtgctctcaggcatttcatagagagaatatctttgtgttgtatggatgcctcacctgtggcaaaaagcctatggcctatggctt

SEQ ID NO: 587 - DNA, 232 bp, Mus musculus; identical to SEQ ID NO: 586
  misc_feature (59)..(59): n is a, c, g, or t

SEQ ID NO: 588 - DNA, 342 bp, Mus musculus
  misc_feature (224)..(224): n is a, c, g, or t
ttctttggggaacaagcaagccttggttgggtaccagctccaagatgctctttcctccttcatgccaggaatcttgaagtcaaaaagagatgatcctctgttggctttttttgtttgtttgtttttgaatttttttgtgggtccatttggcgggtctctcttggggagaagggctgttgagcggggctggggacaccctagctggacgtgtgtacagaacactntggtgggctcccaagcttgccccttctctcttctccttgtttctgctttctctctcctcatttctgagacattcatgcactgtctgtacatactggatctcttttctcaacatatgtg

SEQ ID NO: 589 - DNA, 342 bp, Mus musculus; identical to SEQ ID NO: 588
  misc_feature (224)..(224): n is a, c, g, or t

SEQ ID NO: 590 - DNA, 377 bp, Mus musculus
  misc_feature (298)..(298): n is a, c, g, or t
  misc_feature (322)..(322): n is a, c, g, or t
  misc_feature (326)..(326): n is a, c, g, or t
  misc_feature (334)..(334): n is a, c, g, or t
  misc_feature (340)..(340): n is a, c, g, or t
  misc_feature (349)..(350): n is a, c, g, or t
tgtaattgccctacaggaaggcaggagtgtttgggtattttttgtatgtttcccacatatgcagagtgtgagagcaggctagtcttagtcccagagtgtgtcacaccgggtatgtgacaatcagacgacgctgtgatccactagatgtgccggggttcattgtgctgtcattgttcctgtcttgatttgaagcacatggttgagggtcattggaagccatcttcatcagtacatgtaaagcttatttacatgtgcaaagtgagtgaagtgacatatttaaactgtgagtagcgactcntcgggtacctttcagtactgtgtntacnaaccactncttttngctaagaanntggagagcactttaacaagccagccat

SEQ ID NO: 591 - DNA, 377 bp, Mus musculus; identical to SEQ ID NO: 590
  misc_feature (298)..(298): n is a, c, g, or t
  misc_feature (322)..(322): n is a, c, g, or t
  misc_feature (326)..(326): n is a, c, g, or t
  misc_feature (334)..(334): n is a, c, g, or t
  misc_feature (340)..(340): n is a, c, g, or t
  misc_feature (349)..(350): n is a, c, g, or t

SEQ ID NO: 592 - DNA, 604 bp, Mus musculus
  misc_feature (130)..(144): n is a, c, g, or t
  misc_feature (227)..(227): n is a, c, g, or t
  misc_feature (314)..(314): n is a, c, g, or t
  misc_feature (331)..(331): n is a, c, g, or t
  misc_feature (365)..(365): n is a, c, g, or t
  misc_feature (367)..(376): n is a, c, g, or t
  misc_feature (378)..(404): n is a, c, g, or t
  misc_feature (406)..(411): n is a, c, g, or t
  misc_feature (413)..(416): n is a, c, g, or t
  misc_feature (418)..(419): n is a, c, g, or t
  misc_feature (421)..(421): n is a, c, g, or t
  misc_feature (424)..(424): n is a, c, g, or t
  misc_feature (427)..(427): n is a, c, g, or t
acacacttgagagtgtggtgacccgcagctgaaaggtgagcttggagaccaagccagaaggttggtaacatgctggggcttgcgttgtagtcctgccgggcttgcaggccagttccttccatagggttannnnnnnnnnnnnnnaaacaatcactgcaccactgcgaaagacctgaaggagttccagaaagggcaaagcagcttcccagtgtcctcctggccttggnagtgtccccagccaggagcccttccactcccaacactgggagcaggcttcaccaggctgctctcataagccatttgttgagggggcntggatctcagggttccnatggtggtggtgactgtgggaagagagcagtacnannnnnnnnnntnnnnnnnnnnnnnnnnnnnnnnnnnnntnnnnnncnnnntnngntgnttntacagcatggtcatcaaaaaaaaaacattgcggacttcgtgagggtattcgtgagcctggttacaggtatggaatgggctatacgttgaaccctttgcggcggtggtagaaagcgatccacgacgcgacggtgtacgatacggattctttaggctatacgggagttccaaaacggct

SEQ ID NO: 593 - DNA, 544 bp, Mus musculus
  misc_feature (70)..(84): n is a, c, g, or t
  misc_feature (167)..(167): n is a, c, g, or t
  misc_feature (254)..(254): n is a, c, g, or t
  misc_feature (271)..(271): n is a, c, g, or t
  misc_feature (305)..(305): n is a, c, g, or t
  misc_feature (307)..(316): n is a, c, g, or t
  misc_feature (318)..(344): n is a, c, g, or t
  misc_feature (346)..(351): n is a, c, g, or t
  misc_feature (353)..(356): n is a, c, g, or t
  misc_feature (358)..(359): n is a, c, g, or t
  misc_feature (361)..(361): n is a, c, g, or t
  misc_feature (364)..(364): n is a, c, g, or t
  misc_feature (367)..(367): n is a, c, g, or t
gttggtaacatgctggggcttgcgttgtagtcctgccgggcttgcaggccagttccttccatagggttannnnnnnnnnnnnnnaaacaatcactgcaccactgcgaaagacctgaaggagttccagaaagggcaaagcagcttcccagtgtcctcctggccttggnagtgtccccagccaggagcccttccactcccaacactgggagcaggcttcaccaggctgctctcataagccatttgttgagggggcntggatctcagggttccnatggtggtggtgactgtgggaagagagcagtacnannnnnnnnnntnnnnnnnnnnnnnnnnnnnnnnnnnnntnnnnnncnnnntnngntgnttntacagcatggtcatcaaaaaaaaaacattgcggacttcgtgagggtattcgtgagcctggttacaggtatggaatgggctatacgttgaaccctttgcggcggtggtagaaagcgatccacgacgcgacggtgtacgatacggattctttaggctatacgggagttccaaaacggct

SEQ ID NO: 594 - DNA, 476 bp, Mus musculus
  misc_feature (58)..(58): n is a, c, g, or t
  misc_feature (77)..(77): n is a, c, g, or t
  misc_feature (79)..(79): n is a, c, g, or t
  misc_feature (130)..(130): n is a, c, g, or t
  misc_feature (136)..(136): n is a, c, g, or t
  misc_feature (144)..(145): n is a, c, g, or t
  misc_feature (147)..(147): n is a, c, g, or t
  misc_feature (368)..(368): n is a, c, g, or t
  misc_feature (370)..(376): n is a, c, g, or t
  misc_feature (378)..(383): n is a, c, g, or t
gcatcctctaagacattagagttaaagaagcaagcatctggcagaagcaggaaagaanttgccatacttgcaaacgntntaacttaatgatagttttatcactgtctccctgttccaaccctacccaggntcacanacatgtgnntntagttgatataaacatgtaactattacacagaactgaggtgtcactcctaagtcagcttaattggccttttactaaataaaacaattcatatggaaaccacagtactctagttccagatacaaccttcaatttatgcacttatcaatatcttgaaataaaaagtatttacggccccactcacttatgtataatcaccaataaaatattttttatgacttanannnnnnnannnnnnttacaactacatggagtgtgttatgttgtatttgaaaatacatcttagaaactacatgctctatcttattctcctcaggtactcttgtatttg

SEQ ID NO: 595 - DNA, 476 bp, Mus musculus; identical to SEQ ID NO: 594
  misc_feature (58)..(58): n is a, c, g, or t
  misc_feature (77)..(77): n is a, c, g, or t
  misc_feature (79)..(79): n is a, c, g, or t
  misc_feature (130)..(130): n is a, c, g, or t
  misc_feature (136)..(136): n is a, c, g, or t
  misc_feature (144)..(145): n is a, c, g, or t
  misc_feature (147)..(147): n is a, c, g, or t
  misc_feature (368)..(368): n is a, c, g, or t
  misc_feature (370)..(376): n is a, c, g, or t
  misc_feature (378)..(383): n is a, c, g, or t

SEQ ID NO: 596 - DNA, 239 bp, Mus musculus
  misc_feature (35)..(35): n is a, c, g, or t
  misc_feature (97)..(111): n is a, c, g, or t
tgcctggccaagtttctgttcccctcctcctaaantcaaggtggggtggacaatgacttccacatccctcagggcatagagtccttgccaccacctnnnnnnnnnnnnnnntgtgtggcacccctccccccccaacttccattcctgatcttaggcaagttcttggagtctgctcccagatggcatcggctctgagataccggttacttccctggtcctgagagtcacctgtggtcacc

SEQ ID NO: 597 - DNA, 239 bp, Mus musculus; identical to SEQ ID NO: 596
  misc_feature (35)..(35): n is a, c, g, or t
  misc_feature (97)..(111): n is a, c, g, or t

SEQ ID NO: 598 - DNA, 366 bp, Mus musculus
  misc_feature (95)..(95): n is a, c, g, or t
  misc_feature (97)..(97): n is a, c, g, or t
  misc_feature (123)..(123): n is a, c, g, or t
  misc_feature (180)..(181): n is a, c, g, or t
  misc_feature (184)..(184): n is a, c, g, or t
  misc_feature (187)..(188): n is a, c, g, or t
  misc_feature (194)..(194): n is a, c, g, or t
  misc_feature (199)..(199): n is a, c, g, or t
  misc_feature (204)..(204): n is a, c, g, or t
  misc_feature (210)..(210): n is a, c, g, or t
  misc_feature (212)..(212): n is a, c, g, or t
  misc_feature (310)..(338): n is a, c, g, or t
ggcctagagacaaggactgaactcaccatggtctcctgtactgacactcgatgggacactcaagcctccatcaggaccttgtggaatgctggaancntccagggattaatacttgtggactgncagtcctaatgtagactaggcaccctttcctccatcccagcacagtgtcttggctgnncangcnntccctnagaantccanattgangnttccaagaagaattgcccacgggatgtagtcagctgtggggtctcaggatggggcgttactcttctgtgggctttcggctatttctgtcccttccacnnnnnnnnnnnnnnnnnnnnnnnnnnnnnaggctggagcttgctatgaacttccttt

SEQ ID NO: 599 - DNA, 366 bp, Mus musculus; identical to SEQ ID NO: 598
  misc_feature (95)..(95): n is a, c, g, or t
  misc_feature (97)..(97): n is a, c, g, or t
  misc_feature (123)..(123): n is a, c, g, or t
  misc_feature (180)..(181): n is a, c, g, or t
  misc_feature (184)..(184): n is a, c, g, or t
  misc_feature (187)..(188): n is a, c, g, or t
  misc_feature (194)..(194): n is a, c, g, or t
  misc_feature (199)..(199): n is a, c, g, or t
  misc_feature (204)..(204): n is a, c, g, or t
  misc_feature (210)..(210): n is a, c, g, or t
  misc_feature (212)..(212): n is a, c, g, or t
  misc_feature (310)..(338): n is a, c, g, or t

SEQ ID NO: 600 - DNA, 486 bp, Mus musculus
  misc_feature (136)..(136): n is a, c, g, or t
  misc_feature (176)..(176): n is a, c, g, or t
  misc_feature (178)..(179): n is a, c, g, or t
  misc_feature (201)..(232): n is a, c, g, or t
  misc_feature (329)..(329): n is a, c, g, or t
  misc_feature (458)..(458): n is a, c, g, or t
cattgctaaagaggtgctgtcattggtgcctatgaccaatagtatcataggagaatgagatactggagaatctgttactgaagacaatgttatttattcattgttagtgggtgtgaggtcattttcccagctgaantcttcagcaactagtgttaaattcctaaaaaaaaaaaaanannaaaaggaagacctgaggtccannnnnnnnnnnnnnnnnnnnnnnnnnnnnnnnacatcattaattacacattagctattacaacctaattaaaaatttaagcatataatcttccttctgtgaacatataactatgcaatccccttttcanaaatgtatcttactctactgataactgattgattgattcacctctatcctagatagctacactttcttttcacttccgagagtgctctgagatttttctatttctttctcatgcatagctcctctgaanagtggctttcctttattagtctttgcag

SEQ ID NO: 601 - DNA, 486 bp, Mus musculus; identical to SEQ ID NO: 600
  misc_feature (136)..(136): n is a, c, g, or t
  misc_feature (176)..(176): n is a, c, g, or t
  misc_feature (178)..(179): n is a, c, g, or t
  misc_feature (201)..(232): n is a, c, g, or t
  misc_feature (329)..(329): n is a, c, g, or t
  misc_feature (458)..(458): n is a, c, g, or t

SEQ ID NO: 602 - DNA, 460 bp, Mus musculus
  misc_feature (181)..(239): n is a, c, g, or t
cttgccttgtgtgtaaggctataggcttagtcactagctctgcaaaaaacaagttaaagaatgaatcaggtaaaagctatagaattagattcatgttcaatagagaatgaatgctaagtaaggaagaaaaagcacaccctgtccaggttgctctagaatcttatctcacattctggaggannnnnnnnnnnnnnnnnnnnnnnnnnnnnnnnnnnnnnnnnnnnnnnnnnnnnnnnnnngttaagtatccaaggcaggggcattctgctgagaaaatggcagttaaggaaatttttttgttggtggtggttttttgaaagctatcatagttaatgataattctggtactaatttttattgtctgtagttattgagaagataggaatgtattttataaaacaatattagaaagattagtttgtaacttttgttattactttcctgagatggaatgtgtagc

SEQ ID NO: 603 - DNA, 460 bp, Mus musculus; identical to SEQ ID NO: 602
  misc_feature (181)..(239): n is a, c, g, or t

SEQ ID NO: 604 - DNA, 447 bp, Mus musculus
  misc_feature (98)..(147): n is a, c, g, or t
tgcctgcagcccaaaaccctgaggacctccgcatgtttgccaggctccttcactacttccgtggccgccaccatctggaggagatcatgtacaatgannnnnnnnnnnnnnnnnnnnnnnnnnnnnnnnnnnnnnnnnnnnnnnnnntgctggtggtgaccacccatgaggaccctgttattgccgtcttccaggcactgctcacatgagcccgggcagcatgcctgtgtgtggatggaaacaacctcccttctgccgcagagttcctgactggccttaggaagataggcagccccagcccggtcggtctggtcagaagcagctatggggcagccatggttgggctttgtgattctcttgagacctcacacttgccttgtagttaaggatgaccttgaactcctgatcctcctgcctctgtcctccaagtgctatgattacacacgc

SEQ ID NO: 605 - DNA, 447 bp, Mus musculus; identical to SEQ ID NO: 604
  misc_feature (98)..(147): n is a, c, g, or t

SEQ ID NO: 606 - DNA, 567 bp, Mus musculus
  misc_feature (76)..(80): n is a, c, g, or t
  misc_feature (82)..(98): n is a, c, g, or t
  misc_feature (125)..(146): n is a, c, g, or t
  misc_feature (434)..(452): n is a, c, g, or t
ccgctgttcaagagagaactgcaaatatcttcatcctccgacacacttaaaaacccagctagagattaatgggagnnnnnannnnnnnnnnnnnnnnnctgcagcagcgatgcttgcccagcagnnnnnnnnnnnnnnnnnnnnnncgccgctccatcctgtgcccacttttcctgtaggtcccaccatagggacaaatgcggctattagctttgctccttacttagcgcctgtcacccctggagttgggttagtcccaacagaggttctacccactacaccggtcattgttcccggaagtccaccggtcactgtcccgggctcaactgcaactcagaaacttctcaggactgataaactggaggtatgcagggagttccagcgaggaaactgtgcccggggagagacagactgccgctttgcacacccggcannnnnnnnnnnnnnnnnnncaaacgacaacaccgtaaccgtttgtatggattacataaaggggcgttgcatgagggagaaatgcaaatattttcaccctcctgcacacttgcaggccaaaatcaaagctgcgca

SEQ ID NO: 607 - DNA, 567 bp, Mus musculus; identical to SEQ ID NO: 606
  misc_feature (76)..(80): n is a, c, g, or t
  misc_feature (82)..(98): n is a, c, g, or t
  misc_feature (125)..(146): n is a, c, g, or t
  misc_feature (434)..(452): n is a, c, g, or t

SEQ ID NO: 608 - DNA, 356 bp, Mus musculus
  misc_feature (38)..(38): n is a, c, g, or t
tccagcatgatgaacagcttgtcccactccgagtgctnctggcggcagtcgcatggcgtggctagaacgcaggacacacacaagtgttatcagcttgtcctgggtggccatgggttgcactcttggtgactccaagtttcagcctgtccccagcaaccgctctccttctaaggatagctctgaaaacagcgtgcgtgtaaactcaaagatgacacaggactattctttataggacatgttaaactaactgagaaaatgccattaatatagctaaaaacagttaaagatttcgtataacttaactcatcataaatgttacaaaaataatttaaaacctctggcttttctcagatagt

SEQ ID NO: 609 - DNA, 356 bp, Mus musculus; identical to SEQ ID NO: 608
  misc_feature (38)..(38): n is a, c, g, or t

SEQ ID NO: 610 - DNA, 370 bp, Mus musculus
  misc_feature (326)..(326): n is a, c, g, or t
gccaagcctgtttggcaggaaaagaagtaaacaaggaaggaagatcaacaatgtctgggacacacactcaggccagggccgtgaggcagacactggactgcattggactggccttggtctttgagaagccaccaggttgagtctgcagcatcctgggcccctttgagcagctaccatcatcccaacaggcccctcctcccgccacccgtgacttacaggatgatcagagcagcatcccgagagtaatccagcagtatctcactcagtctcacctgccgaagggactggggccagggaaagccaaggtcagctctactttcttaacngcaccccaaccccaccccacccccagtttaactggatacagaat

SEQ ID NO: 611 - DNA, 370 bp, Mus musculus; identical to SEQ ID NO: 610
  misc_feature (326)..(326): n is a, c, g, or t

SEQ ID NO: 612 - DNA, 192 bp, Mus musculus
ctttgctgggaattgttttacagctcttcagtggtctttctagccagttattcctgtgaagaattggactttgaggagctaaagctttgaatgggggctggtgcaggggcctgggagtggagagtctgctttcagatactttaacctcggagctgtgacctttgattgtagcaaacatcgatttcaaaagct

SEQ ID NO: 613 - DNA, 192 bp, Mus musculus; identical to SEQ ID NO: 612

SEQ ID NO: 614 - DNA, 285 bp, Mus musculus
  misc_feature (258)..(258): n is a, c, g, or t
tttgagatcactcagcctcccttgctgtccatcaattcagactccctcctgtctcatgtggagcagctgcttcgagccttcatccttaagattagtgtgtgtgatgctgtcctggatcacaaccctccaggctgcacatttacagtcctcgtgcacacaagagaagctgctactcgaaacatggagaagatacaggtcatcaaggacttcccatggatcctggcagatgaacaggatgtccacatgcacgacccccgnttgatacccctaaaaaccatgacgtcg

SEQ ID NO: 615 - DNA, 285 bp, Mus musculus; identical to SEQ ID NO: 614
  misc_feature (258)..(258): n is a, c, g, or t

SEQ ID NO: 616 - DNA, 159 bp, Mus musculus
  misc_feature (63)..(116): n is a, c, g, or t
tgggtttggcctcctacggggcacacggcgctcagtttccggatgcctacgggaaggagctcnnnnnnnnnnnnnnnnnnnnnnnnnnnnnnnnnnnnnnnnnnnnnnnnnnnnnnccctcttgcagaaaacctgtctgggcaggattactgttagctt

SEQ ID NO: 617 - DNA, 159 bp, Mus musculus; identical to SEQ ID NO: 616
  misc_feature (63)..(116): n is a, c, g, or t

SEQ ID NO: 618 - DNA, 459 bp, Mus musculus
  misc_feature (401)..(408): n is a, c, g, or t
  misc_feature (410)..(410): n is a, c, g, or t
  misc_feature (412)..(418): n is a, c, g, or t
ggaagtatataccacacaaccaggcgtccagttttacacaggaaacttcttggatggtactctgaaaggcaagaacggtgcggtgtatcccaagcactcaggtctctgcctcgagacccagaactggcctgattcggtcaatcagccccagttccctccggcgctgctgaggcctggagaggaatacaaccacactacctggttcaagttctctgttgcttaaagaagacggaagatgagacccggtccccactcacctgccttgctttaaaagtaatcctgcgtgttaaatcatacagatcgtagcagccataataatcaatgtgaatactgataccctttcccagcagctacagactatgtctaatgaccagctctgttctctgtctagtgccatcgcnnnnnnnntnannnnnnnagagaagtggacctgtggactctcctgatttcataggttcc

SEQ ID NO: 619 - DNA, 459 bp, Mus musculus; identical to SEQ ID NO: 618
  misc_feature (401)..(408): n is a, c, g, or t
  misc_feature (410)..(410): n is a, c, g, or t
  misc_feature (412)..(418): n is a, c, g, or t

SEQ ID NO: 620 - DNA, 146 bp, Mus musculus
  misc_feature (55)..(98): n is a, c, g, or t
cctgctcaccagatctcaggtaggaaagccagtctctgctgacagcacgggatcnnnnnnnnnnnnnnnnnnnnnnnnnnnnnnnnnnnnnnnnnnnnggacttacttttgtgaaaggtcgcacttggctccctgtttgttatcta

SEQ ID NO: 621 - DNA, 146 bp, Mus musculus; identical to SEQ ID NO: 620
  misc_feature (55)..(98): n is a, c, g, or t

SEQ ID NO: 622 - DNA, 430 bp, Mus musculus
cacttcccatttagtggggacatgaaactagagccccactgttatgtgattttacagaggaagatgtagcttctccaagtaggattccttcccttcctcctgtcccaggtaagaaaccccagaggactgaacagtccacagccctccagaagcagctgcagttccagctttggaagccctttctacaccttaggtttctcaggcctttgagctggtatgtccgtctgtctatctgtctctctcacactcgagcacacagacacccctgcctgcaggttgtgttgtggctgtggggcccactcgtttagaatggctttcctgctgcatgttgagctcctccagcactaggagagtgcagtagctattccaagtggcttcatgcactttacttccataaactttataagagacagtgtgtagccctttatag

SEQ ID NO: 623 - DNA, 430 bp, Mus musculus; identical to SEQ ID NO: 622

SEQ ID NO: 624 - DNA, 580 bp, Mus musculus
  misc_feature (189)..(189): n is a, c, g, or t
  misc_feature (197)..(197): n is a, c, g, or t
  misc_feature (207)..(207): n is a, c, g, or t
  misc_feature (216)..(217): n is a, c, g, or t
  misc_feature (227)..(227): n is a, c, g, or t
  misc_feature (230)..(230): n is a, c, g, or t
  misc_feature (236)..(236): n is a, c, g, or t
  misc_feature (250)..(251): n is a, c, g, or t
  misc_feature (257)..(257): n is a, c, g, or t
  misc_feature (263)..(263): n is a, c, g, or t
  misc_feature (285)..(285): n is a, c, g, or t
  misc_feature (300)..(300): n is a, c, g, or t
  misc_feature (313)..(313): n is a, c, g, or t
  misc_feature (322)..(322): n is a, c, g, or t
  misc_feature (340)..(343): n is a, c, g, or t
  misc_feature (350)..(351): n is a, c, g, or t
ctatttcaggagaagacgattagctatgctatttaaggatcactaacttagtcaggttggttactgtgctgtgtttgcattgcgaggtttaagtgtcagagcattgtcagttctgttcctacgaagatggtgtatattagcctgttattgatatgaaagttatttaaataggtttgtattacaaatttnaatactcnaaaatatttnccaagatgnntttttatcanggncttagngatgtaatttgggnnaaaatncagtcnttttttaagccaaaattttatnacttttataacttgncaagtaactaagncctgagtancaaaaacataagattttnnnngttttgnntttttttaaagagttgttcattctaagtttaacaaaatggtagtttgtcaattgtttcattttttgtgtaatggctatttgtatttgattaaagcatgctttgttttatatgaagactattttaaataacctcccttcctacatgttcctatttcatatattataatggcatccttgggatttcctgcaactatgtcagattttctttcaacctttttggactgcacag

SEQ ID NO: 625 - DNA, 580 bp, Mus musculus; identical to SEQ ID NO: 624
  misc_feature (189)..(189): n is a, c, g, or t
  misc_feature (197)..(197): n is a, c, g, or t
  misc_feature (207)..(207): n is a, c, g, or t
  misc_feature (216)..(217): n is a, c, g, or t
  misc_feature (227)..(227): n is a, c, g, or t
  misc_feature (230)..(230): n is a, c, g, or t
  misc_feature (236)..(236): n is a, c, g, or t
  misc_feature (250)..(251): n is a, c, g, or t
  misc_feature (257)..(257): n is a, c, g, or t
  misc_feature (263)..(263): n is a, c, g, or t
  misc_feature (285)..(285): n is a, c, g, or t
  misc_feature (300)..(300): n is a, c, g, or t
  misc_feature (313)..(313): n is a, c, g, or t
  misc_feature (322)..(322): n is a, c, g, or t
  misc_feature (340)..(343): n is a, c, g, or t
  misc_feature (350)..(351): n is a, c, g, or t

SEQ ID NO: 626 - DNA, 367 bp, Mus musculus
  misc_feature (175)..(175): n is a, c, g, or t
  misc_feature (177)..(177): n is a, c, g, or t
ttttctgaagcatccagagatagagcaaagctggacagatgttctcttcatcttctctgattttcttgggtaccgtttgcttgtcatgcctgcacctgtggagattgctgttgtggtccgatcgtaagttctgggacgcacagagctgtgtgagtgcagattcccttcacacagngntgaggtgctcagtggcctgcagccgagatgcccagagcatgtcagatttcccaagcaggacctctctagacatctctcagcatgtgctgctgtctcttacgaggtagaaaccctgaacacaagcttccagaattaaattgaaccctttagttcctggtctcaaaggatacccacagctgtgatgggaagt

SEQ ID NO: 627 - DNA, 367 bp, Mus musculus; identical to SEQ ID NO: 626
  misc_feature (175)..(175): n is a, c, g, or t
  misc_feature (177)..(177): n is a, c, g, or t

SEQ ID NO: 628 - DNA, 403 bp, Mus musculus
  misc_feature (275)..(289): n is a, c, g, or t
tgcttccagtgatgctcatgtccatggtcttcagcagcccgaacccaggggtcgccagaagccacggggaccaacacctggctcctaggaggtggctcttggaaggtggccaagaatgtgaatgcaaagattggttcctgcaagccccaaagagaaaagccacagcagtgctggggccaccaaggaagcagtgtccctgtgatcacgtcaagggcagggagaaaaaaaacagacaccaaaagcaccacaggaagtcgcaaagaccctccagagcnnnnnnnnnnnnnnncaaacgatgtcacctggcaagctttgcgctgcccttatagtactgagactctgctcctctagttagactctctcagtggaaaggaggtgaccagccctagcacggttcttattc

SEQ ID NO: 629 - DNA, 403 bp, Mus musculus; identical to SEQ ID NO: 628
  misc_feature (275)..(289): n is a, c, g, or t

SEQ ID NO: 630 - DNA, 369 bp, Mus musculus
ccagggacactggaagcatggatcctgatgtccagctctgtcattgtattgaaagcacaataattgaaataataaacatgagtgttagtggaatttaaaaaaagttttaagtgcagccacttgctatactgaatctggactttatgagaactctaaactgaatgagaatagtgagatcttggaattgctgaagtgactcaattcagcatgaggataatttagagctctctgagaattatacttgtttgattggcatatctttggatctgctctgatggtatgtttatattgtagcagctgaacttcttttccactggagacactttaagaaacttgtcactagaaaaggattggttcctgtacttagca

SEQ ID NO: 631 - DNA, 369 bp, Mus musculus; identical to SEQ ID NO: 630

SEQ ID NO: 632 - DNA, 554 bp, Mus musculus
  misc_feature (27)..(62): n is a, c, g, or t
  misc_feature (158)..(158): n is a, c, g, or t
  misc_feature (160)..(160): n is a, c, g, or t
  misc_feature (172)..(189): n is a, c, g, or t
  misc_feature (206)..(206): n is a, c, g, or t
  misc_feature (208)..(216): n is a, c, g, or t
  misc_feature (234)..(248): n is a, c, g, or t
  misc_feature (341)..(341): n is a, c, g, or t
cttatgactcgatggacattggaaaannnnnnnnnnnnnnnnnnnnnnnnnnnnnnnnnnnngctcagacttccttttagcaaagcacttgtcatcttcctgtatgtaaatgctaacttcatagtacacaaaatatgagagtatacacatgtcattancnatcaaaactatnnnnnnnnnnnnnnnnnntgtccaaagagcatcanannnnnnnnncttgagtggacatcttcnnnnnnnnnnnnnnnagtatttatttctgcctaaggatttgacatctcttctgtttattaatagagatgtttatcttagcataaaagagggaaatgtgcctttggctncacagtctatccagggtgatatggttgggtaactggagttagaagatgagatgatgtctcttgggggcaagtgttggcttcggtgtggcatctgggctgtgaactggtgggactgttgaggttgagaatggtgctcgctggtcacttgaatccaagtgtgacgtcatgctctgtggcttctgccttcacacttctcacttcaagtactgtagg

SEQ ID NO: 633 - DNA, 554 bp, Mus musculus; identical to SEQ ID NO: 632
  misc_feature (27)..(62): n is a, c, g, or t
  misc_feature (158)..(158): n is a, c, g, or t
  misc_feature (160)..(160): n is a, c, g, or t
  misc_feature (172)..(189): n is a, c, g, or t
  misc_feature (206)..(206): n is a, c, g, or t
  misc_feature (208)..(216): n is a, c, g, or t
  misc_feature (234)..(248): n is a, c, g, or t
  misc_feature (341)..(341): n is a, c, g, or t

SEQ ID NO: 634 - DNA, 415 bp, Mus musculus
  misc_feature (38)..(130): n is a, c, g, or t
  misc_feature (200)..(200): n is a, c, g, or t
  misc_feature (318)..(344): n is a, c, g, or t
tagactcagctcgtttgggtttttgtttttggtttttnnnnnnnnnnnnnnnnnnnnnnnnnnnnnnnnnnnnnnnnnnnnnnnnnnnnnnnnnnnnnnnnnnnnnnnnnnnnnnnnnnnnnnnnnnnnngtcagcttgttttgattagtcagtctgaaaaggtgtctgaacagagtgcatgggagaactagacatgggncctgtgaacctctgcagaaagggatccagatggaaacacgccagaccctcaggtgggaatgagcaaggcagatgaagaggccaggcccctgaagctgccgtgaaacaggaggtttgcnnnnnnnnnnnnnnnnnnnnnnnnnnnggtaggcaccgagcctctctgctctgctttgtagagccaggcagaagaattgatctgaggtgctgatcctg

SEQ ID NO: 635 - DNA, 415 bp, Mus musculus; identical to SEQ ID NO: 634
  misc_feature (38)..(130): n is a, c, g, or t
  misc_feature (200)..(200): n is a, c, g, or t
  misc_feature (318)..(344): n is a, c, g, or t

SEQ ID NO: 636 - DNA, 459 bp, Mus musculus
  misc_feature (162)..(162): n is a, c, g, or t
  misc_feature (164)..(164): n is a, c, g, or t
  misc_feature (166)..(166): n is a, c, g, or t
  misc_feature (215)..(250): n is a, c, g, or t
tgaggcatcctgtcttaaagagataaggcagaccgatggagagtgacagagaggacgacccccagccccttgcctgcacatgtgcgagcgcatccttacactcaggtgcacgagccacacagataccagatacagaaaaaaaataaaaatacaacaacacananancagtgtgtactgtaacacagccaagcaccatcccatccccattttgcannnnnnnnnnnnnnnnnnnnnnnnnnnnnnnnnnnnagataaagccacacttaaccacctacctgataacctgagttggatcctcaggagccacgtggtaaatggagagaaatgacccctacaagttgtcctttgctgtctacatagcataaagcacacaaacacacacacacagaggcataggaggtaagtaaatgaactaaataagggtgtcaaacacacactaaacaagagcaatggtgatg

SEQ ID NO: 637 - DNA, 459 bp, Mus musculus; identical to SEQ ID NO: 636
  misc_feature (162)..(162): n is a, c, g, or t
  misc_feature (164)..(164): n is a, c, g, or t
  misc_feature (166)..(166): n is a, c, g, or t
  misc_feature (215)..(250): n is a, c, g, or t

SEQ ID NO: 638 - DNA, 433 bp, Mus musculus
gttacccagtcatttgtctcagttaacatttaaaggagtttttgtgagacaaattctccattgtgagatctctgaagtgggattgtcttattttccttagtacagcccactgccaaaaagcttcctctgatgtcaaatcaggatgtattaccgaaactgattccaaggacatccacatagctgagccaagatgctccaggccagtggcaggtggactggaagaggcctctccactgagcctgtgttctgtgcttcaggctctggatcatcacccccgctgctctcccattccggtacctaagtaacatctatgcaaagaaacacattaaaagcagcaataaaactgctcctacccacagccacggatcttccaaacctagccccgctctcaggcctctacccagcagccagaacacagcaagagttgaggtga

SEQ ID NO: 639 - DNA, 433 bp, Mus musculus; identical to SEQ ID NO: 638

SEQ ID NO: 640 - DNA, 331 bp, Mus musculus
  misc_feature (135)..(153): n is a, c, g, or t
ccattcccaggaggatggaagaaaagagtttccaggcccctccaagtttaggaaagaggaggtgatggcatccaagctgagctggaggaagctgctgatcctctttgacttcacgtctctggacctctcgggctnnnnnnnnnnnnnnnnnnnccctcccaggggagccttgaactggatattggggttcagcttccttttcttctaaatccatgggcaccctctcctctagagtcacactggctgctctcagcactgccggggcttggtggcttggttggaatcgctttttttactgagaggagcctgcggatgttcctgtacctgccgg

SEQ ID NO: 641 - DNA, 331 bp, Mus musculus; identical to SEQ ID NO: 640
  misc_feature (135)..(153): n is a, c, g, or t

SEQ ID NO: 642 - DNA, 518 bp, Mus musculus
  misc_feature (415)..(416): n is a, c, g, or t
cttcattggcgtaggaataagagacagcacaagttcaatttataaccttgaacccagcgaagatgttagccaagaatagcggactactcataagaggaaagaaaatagcctttcagcgctatcaggagctgatagggccctggatatttaatttcacgcgaaagttgcagggcatgcccattcaaatttcttccaacaaatcacaaaggcgtatagacactttcttatccgtttattggtcaaatggaaatcccagccctccctacctcccgcctctcactagggagccaattggaaaaacttaggtttcatcatcaagtactgtacttgctattggctgtccgagctgtcaatctagggaaggcgggccaggccgaactgtcctatttaagaagaggacaaaggcggcgcgcannttgtgtcgtccgccattttgtgctcagcaaggtggcaaccacgttccctgagcgacttctccgcttctgcctcgaccgccccttgactacagctatgtctcg

SEQ ID NO: 643 - DNA, 518 bp, Mus musculus; identical to SEQ ID NO: 642
  misc_feature (415)..(416): n is a, c, g, or t

SEQ ID NO: 644 - DNA, 549 bp, Mus musculus
  misc_feature (149)..(149): n is a, c, g, or t
  misc_feature (210)..(210): n is a, c, g, or t
  misc_feature (220)..(220): n is a, c, g, or t
  misc_feature (393)..(395): n is a, c, g, or t
  misc_feature (399)..(399): n is a, c, g, or t
  misc_feature (403)..(404): n is a, c, g, or t
  misc_feature (411)..(411): n is a, c, g, or t
  misc_feature (423)..(423): n is a, c, g, or t
agtgctatagcaactgcacctggctctcaccggcaccggtctctgccccactttctcacttcaattggcagcgctgcatattggcacaaacacccaaacactgcgggccccatcctcagttttagagccctacccctttgctcctttcntgctaagctaatgcaggtggcaagagagtgaggggtggggttccaacgacaatactccggnggagacttgngaacaaggggctgaggccgaactgtctgcatctcatactgggacctgcatgtaccagtgccagggcttgggttgaatcctgctcagccctatggtgcccaatctctgtcctaccatctgcatgtaccatcaggccctggatggagcccatcctggctcacttcacttgcattnnnttgncccnnggtgagncactccaccccntcagagatggagctgtacagagggtctggagactaagattatcctgtgaccaaaggagacatgggaagaggccctccctccttccacgattgaggttcccccaccaacccggttctcagatatgca

SEQ ID NO: 645 - DNA, 549 bp, Mus musculus; identical to SEQ ID NO: 644
  misc_feature (149)..(149): n is a, c, g, or t
  misc_feature (210)..(210): n is a, c, g, or t
  misc_feature (220)..(220): n is a, c, g, or t
  misc_feature (393)..(395): n is a, c, g, or t
  misc_feature (399)..(399): n is a, c, g, or t
  misc_feature (403)..(404): n is a, c, g, or t
  misc_feature (411)..(411): n is a, c, g, or t
  misc_feature (423)..(423): n is a, c, g, or t

SEQ ID NO: 646 - DNA, 479 bp, Mus musculus
  misc_feature (45)..(46): n is a, c, g, or t
  misc_feature (254)..(254): n is a, c, g, or t
  misc_feature (347)..(347): n is a, c, g, or t
  misc_feature (373)..(373): n is a, c, g, or t
  misc_feature (378)..(379): n is a, c, g, or t
  misc_feature (386)..(386): n is a, c, g, or t
  misc_feature (394)..(395): n is a, c, g, or t
ctggattaagctctcagggctgctgcgcccgactgtgagcggaanntgtcttcccagtgccctgggagcctggagtgttgagcaggaatagtcagtgctctgagatgctggcccggtggccagggtccttctcttaccaaattatgtgtgcctcctctgaggaagaggaaggcatgggtctcctatggccctttagtccctcgtgggtcactacactgacataagtcatattcagagctgatgctggctaggcnagaccctaaactaaacccttctaaagctgtccaggccccccctttcctggtccttccttgcatcctgtggattaaatcatctctacaaactangccactgccacaaatgggctgctgcnggcanngtggccntggaaggnngtccctgtcagatttcacctgacattctcactacgaaaaagcatgttgtgactgaaaagagagatgagctattctccaagaagc

SEQ ID NO: 647 - DNA, 479 bp, Mus musculus; identical to SEQ ID NO: 646
  misc_feature (45)..(46): n is a, c, g, or t
  misc_feature (254)..(254): n is a, c, g, or t
  misc_feature (347)..(347): n is a, c, g, or t
  misc_feature (373)..(373): n is a, c, g, or t
  misc_feature (378)..(379): n is a, c, g, or t
  misc_feature (386)..(386): n is a, c, g, or t
  misc_feature (394)..(395): n is a, c, g, or t

SEQ ID NO: 648 - DNA, 579 bp, Mus musculus
  misc_feature (163)..(164): n is a, c, g, or t
  misc_feature (166)..(166): n is a, c, g, or t
  misc_feature (173)..(173): n is a, c, g, or t
  misc_feature (178)..(179): n is a, c, g, or t
  misc_feature (192)..(192): n is a, c, g, or t
  misc_feature (376)..(376): n is a, c, g, or t
  misc_feature (379)..(379): n is a, c, g, or t
  misc_feature (396)..(396): n is a, c, g, or t
  misc_feature (398)..(398): n is a, c, g, or t
  misc_feature (400)..(402): n is a, c, g, or t
  misc_feature (406)..(411): n is a, c, g, or t
  misc_feature (414)..(417): n is a, c, g, or t
  misc_feature (420)..(420): n is a, c, g, or t
  misc_feature (422)..(422): n is a, c, g, or t
  misc_feature (454)..(454): n is a, c, g, or t
  misc_feature (457)..(457): n is a, c, g, or t
  misc_feature (462)..(462): n is a, c, g, or t
  misc_feature (465)..(465): n is a, c, g, or t
  misc_feature (478)..(478): n is a, c, g, or t
  misc_feature (554)..(554): n is a, c, g, or t
gtagagcctcattagttaatattcccttccctcgggagacccaagtaacagagcggttgcatggataccaggttggttgacactgttcatttaaaccacagtaaacgagtgtcctcttgtgcctgtggttttgagatctaataggccattctgtgtcatgtcnngntggcatnaggcnnttttgagttcccntcatctgtagccagtgtcacaggacaggctaatgggtttgtacagtattgttggactttacctatgtttcttgtccacactgaaaactcatttagttcgagtgcagcctcctccctgtggcctcactgttggtgtgtgccctgaggcagttcctggtgaacaggaagactatactgcaaggacnagntgtgtgttaggagaacncntnnntttnnnnnnggnnnntcntntcccctgacccccccctcaccccccatgaganttnttcanatntccagaatagacntggctaacaggagacaaggtaggaaccattgtacgagctttgtacagatttgtacatttgtgtaataggccttttntgctttaagtgtagctttttacctg

SEQ ID NO: 649 - DNA, 579 bp, Mus musculus; identical to SEQ ID NO: 648
  misc_feature (163)..(164): n is a, c, g, or t
  misc_feature (166)..(166): n is a, c, g, or t
  misc_feature (173)..(173): n is a, c, g, or t
  misc_feature (178)..(179): n is a, c, g, or t
  misc_feature (192)..(192): n is a, c, g, or t
  misc_feature (376)..(376): n is a, c, g, or t
  misc_feature (379)..(379): n is a, c, g, or t
  misc_feature (396)..(396): n is a, c, g, or t
  misc_feature (398)..(398): n is a, c, g, or t
  misc_feature (400)..(402): n is a, c, g, or t
  misc_feature (406)..(411): n is a, c, g, or t
  misc_feature (414)..(417): n is a, c, g, or t
  misc_feature (420)..(420): n is a, c, g, or t
  misc_feature (422)..(422): n is a, c, g, or t
  misc_feature (454)..(454): n is a, c, g, or t
  misc_feature (457)..(457): n is a, c, g, or t
  misc_feature (462)..(462): n is a, c, g, or t
  misc_feature (465)..(465): n is a, c, g, or t
  misc_feature (478)..(478): n is a, c, g, or t
  misc_feature (554)..(554): n is a, c, g, or t

SEQ ID NO: 650 - DNA, 408 bp, Mus musculus
  misc_feature (127)..(127): n is a, c, g, or t
actgtgcttcggagacttaagagaaatttcccctttcttttacatccgaatgtgcctgaactttttcaaatatgtaaatgctaccatgttccaaacccatctttagtgtctttgtatggagctgtgnaccctggaaataacacagagtcccaggagcaggtgcctgagacatggacccctttgtagtcacagagaggtcattggtcgtcgagacttgaattaataagtgacatcacgccagtttattttccttcacagcgtacaaacaacgctttctgtgcactacatattcttcagtgtagagttcttgtttttcggggagaggcacagatgccccattgtgttggatggattactacaggcttctgatgcacactgctattgatgtgaccccgtttcatcgccgct

SEQ ID NO: 651 - DNA, 408 bp, Mus musculus; identical to SEQ ID NO: 650
  misc_feature (127)..(127): n is a, c, g, or t

SEQ ID NO: 652 - DNA, 369 bp, Mus musculus
  misc_feature (279)..(313): n is a, c, g, or t
ttggacacaggctagctatttattgcagagtggcaagtgacctggggaggagtggccaggatgctaaaggagttggagaattcaaatatggattgtcttattccccaaggttaaccctgacatcctctccccgttcctgcctgagagggctgccagctttaccctagagccgagtataagggaggccatatacactcccgccatcttgaccgcccccagacctaggacttggtagctggtagctcagccccagtactgctccctttgttgactgggacnnnnnnnnnnnnnnnnnnnnnnnnnnnnnnnnnnntccttcttgcctgcctcccccaccccaccccttgccccgtttcctgggaccatgct

SEQ ID NO: 653 - DNA, 369 bp, Mus musculus; identical to SEQ ID NO: 652
  misc_feature (279)..(313): n is a, c, g, or t

SEQ ID NO: 654 - DNA, 467 bp, Mus musculus
  misc_feature (113)..(119): n is a, c, g, or t
  misc_feature (122)..(124): n is a, c, g, or t
  misc_feature (126)..(126): n is a, c, g, or t
  misc_feature (129)..(129): n is a, c, g, or t
  misc_feature (131)..(133): n is a, c, g, or t
  misc_feature (135)..(137): n is a, c, g, or t
  misc_feature (140)..(144): n is a, c, g, or t
  misc_feature (147)..(151): n is a, c, g, or t
  misc_feature (153)..(155): n is a, c, g, or t
  misc_feature (157)..(157): n is a, c, g, or t
  misc_feature (159)..(159): n is a, c, g, or t
  misc_feature (328)..(346): n is a, c, g, or t
aaaccaaatgactagcaccagtgagaaacaccagtcatttgttggtggaaagagggtggctatggacaaaaagattactacagtcctctcagctgtcactgagagctggatcnnnnnnntcnnntnggnannnannngannnnngannnnncnnncnanccactggacgaaggagattccgataaaggaggcaataggacccggtcaaaagctggggggcatgagggtgggggtgggaggcagagagttgatgaatgagaggacagaacattccagactgtcgcagtcccttacactgcagggttctaagcccctccaccaccaaccnnnnnnnnnnnnnnnnnnngttccctcttaggtgctaacttcaggaccacagtttttgggacctaagtcaccacgtggaatctccttctctcttagcatccctctggtatgaatcccactcctctgaaatgtcaaggatc

SEQ ID NO: 655 - DNA, 467 bp, Mus musculus; identical to SEQ ID NO: 654
  misc_feature (113)..(119): n is a, c, g, or t
  misc_feature (122)..(124): n is a, c, g, or t
  misc_feature (126)..(126): n is a, c, g, or t
  misc_feature (129)..(129): n is a, c, g, or t
  misc_feature (131)..(133): n is a, c, g, or t
  misc_feature (135)..(137): n is a, c, g, or t
  misc_feature (140)..(144): n is a, c, g, or t
  misc_feature (147)..(151): n is a, c, g, or t
  misc_feature (153)..(155): n is a, c, g, or t
  misc_feature (157)..(157): n is a, c, g, or t
  misc_feature (159)..(159): n is a, c, g, or t
  misc_feature (328)..(346): n is a, c, g, or t

SEQ ID NO: 656 - DNA, 399 bp, Mus musculus
  misc_feature (86)..(102): n is a, c, g, or t
tcgaagttgaggtaccccgtgcccaaaaccactctgttgcctacctttcctggtgtcttaaatcacttttccttaccccacaagannnnnnnnnnnnnnnnngcaagaatggatgtagtcatgacccacagaagtttccaaggccgtgtaagtttgtgtcctggagtgctggtagaatcatctcctagcgtgagtaccaaagtttctagcctcaaacccagacctgagtaggtaggactccccagggacatctgtgtttcagaaagcatctaggtactatgactcagatagtgactgtgatcaataaattacctctgcagagcagtccttgtgaaggaagtttttaaaacaacccgaacatcttgctcttgaccaggaggtcaagacctcttggctctt

SEQ ID NO: 657 - DNA, 399 bp, Mus musculus; identical to SEQ ID NO: 656
  misc_feature (86)..(102): n is a, c, g, or t

SEQ ID NO: 658 - DNA, 230 bp, Mus musculus
actcagatagtgactgtgatcaataaattacctctgcagagcagtccttgtgaaggaagtttttaaaacaacccgaacatcttgctcttgaccaggaggtcaagacctcttggctcttgaacagactgttcccagacactggatcttggtggcctcggagtcaccacagcgtctcgagactgaacacttcgtatgcatcacatgctgcctgagtcactagtacctacaca

SEQ ID NO: 659 - DNA, 230 bp, Mus musculus; identical to SEQ ID NO: 658

SEQ ID NO: 660 - DNA, 253 bp, Mus musculus
  misc_feature (32)..(68): n is a, c, g, or t
atccctgcactcacggtactggggagcccctnnnnnnnnnnnnnnnnnnnnnnnnnnnnnnnnnnnnnaactgagcacacccccaacacctctggggttgcaggagaccattgcagagtctttgtacatcgcccggcccctgctgcacttgctcagcctgggcttatggggtcagcgatcgtggacaccctggctactgtctggtgtggtagatatgactagcctgagtctcctgagtgacaggaagaacttg

SEQ ID NO: 661 - DNA, 253 bp, Mus musculus; identical to SEQ ID NO: 660
  misc_feature (32)..(68): n is a, c, g, or t

SEQ ID NO: 662 - DNA, 70 bp, Mus musculus
tacattctggaagacccttaaaagtctgtagctgaggtctctggtgaattctagtcaggtccttttcttc

SEQ ID NO: 663 - DNA, 70 bp, Mus musculus; identical to SEQ ID NO: 662

SEQ ID NO: 664 - DNA, 105 bp, Mus musculus
tatttgctcacatggtagaactaaactaaaagaccttaactatgaatcatggtgcgcactaatcccgagtgttccgatggatagtgtgcatgcaaactcagcagc

SEQ ID NO: 665 - DNA, 105 bp, Mus musculus; identical to SEQ ID NO: 664

SEQ ID NO: 666 - DNA, 437 bp, Mus musculus
  misc_feature (75)..(76): n is a, c, g, or t
  misc_feature (136)..(136): n is a, c, g, or t
  misc_feature (154)..(154): n is a, c, g, or t
  misc_feature (170)..(170): n is a, c, g, or t
  misc_feature (174)..(219): n is a, c, g, or t
  misc_feature (221)..(221): n is a, c, g, or t
  misc_feature (231)..(231): n is a, c, g, or t
  misc_feature (241)..(241): n is a, c, g, or t
  misc_feature (264)..(264): n is a, c, g, or t
  misc_feature (266)..(266): n is a, c, g, or t
  misc_feature (313)..(313): n is a, c, g, or t
  misc_feature (377)..(404): n is a, c, g, or t
tctgcaaaggctcaagacacctcctggtgggaggaaggaggaaggcgccctcaagcttcacccgtgggacatccnncgtgtaggaactcacttctggccttttgctacacaacacagccttttgaaaactcttacnggatacaaaactgaaccnagcttgaatgtacaangatnnnnnnnnnnnnnnnnnnnnnnnnnnnnnnnnnnnnnnnnnnnnnntnccagggtttnctccttagcnaacggtcttgtgtatcgtaagtnantggagtcttcttttccctagtgatgtatttctagagctgcttactanggactcctaatgaataatcagaaaacatggctctgaactgaaaggagaagcagaaatgtgctannnnnnnnnnnnnnnnnnnnnnnnnnnnttacttattcttcactggggtccaaagaacttt

SEQ ID NO: 667 - DNA, 437 bp, Mus musculus; identical to SEQ ID NO: 666
  misc_feature (75)..(76): n is a, c, g, or t
  misc_feature (136)..(136): n is a, c, g, or t
  misc_feature (154)..(154): n is a, c, g, or t
  misc_feature (170)..(170): n is a, c, g, or t
  misc_feature (174)..(219): n is a, c, g, or t
  misc_feature (221)..(221): n is a, c, g, or t
  misc_feature (231)..(231): n is a, c, g, or t
  misc_feature (241)..(241): n is a, c, g, or t
  misc_feature (264)..(264): n is a, c, g, or t
  misc_feature (266)..(266): n is a, c, g, or t
  misc_feature (313)..(313): n is a, c, g, or t
  misc_feature (377)..(404): n is a, c, g, or t

SEQ ID NO: 668 - DNA, 551 bp, Mus musculus
  misc_feature (200)..(200): n is a, c, g, or t
  misc_feature (233)..(233): n is a, c, g, or t
  misc_feature (253)..(253): n is a, c, g, or t
  misc_feature (268)..(268): n is a, c, g, or t
  misc_feature (323)..(323): n is a, c, g, or t
  misc_feature (404)..(404): n is a, c, g, or t
  misc_feature (407)..(408): n is a, c, g, or t
cctaggacatcagtgtgtctttgtgcagcttgtgtttgtctaaccaaccttcctatttttatttctctttctatcattatagctgagatttgtaaatagagatatgatgtatttagactttctcacaataacattaagctatttatactgtgatactctatttgagtatcaaacgttctgtggtaagttacaatatggtnttttaaggaacacaattttcgaaaccagctttnttctgtataactcaagtgtntatagcttgtgtganttcagtataatagatatgtccccttagctaatggcaaaaatttgaaatatttttntattatttataattacaaatttttattaaaagaggtgtacagtctttctaaaacaaagtaataaatgtcaaatataaatanaannaagcattaattataatttgtctggctttggagcaagggtttatggatggtctgcttaacactgcattaagtatttaagggtttaattcatctacccacctgcccttgttcccataaaaaacctttgtctctcttgtgtcccag

SEQ ID NO: 669 - DNA, 551 bp, Mus musculus; identical to SEQ ID NO: 668
  misc_feature (200)..(200): n is a, c, g, or t
  misc_feature (233)..(233): n is a, c, g, or t
  misc_feature (253)..(253): n is a, c, g, or t
  misc_feature (268)..(268): n is a, c, g, or t
  misc_feature (323)..(323): n is a, c, g, or t
  misc_feature (404)..(404): n is a, c, g, or t
  misc_feature (407)..(408): n is a, c, g, or t

SEQ ID NO: 670 - DNA, 602 bp, Mus musculus
  misc_feature (84)..(84): n is a, c, g, or t
  misc_feature (92)..(92): n is a, c, g, or t
  misc_feature (128)..(128): n is a, c, g, or t
  misc_feature (474)..(474): n is a, c, g, or t
  misc_feature (485)..(488): n is a, c, g, or t
  misc_feature (490)..(490): n is a, c, g, or t
  misc_feature (493)..(494): n is a, c, g, or t
  misc_feature (531)..(532): n is a, c, g, or t
cattgtgacataaacatcgtagtaatatattaaaatgaatgtaaatggaagttaaaattacattactgtgaaacttaccttccngctgttangtgtcagagatttgtgttagtgggtaattcttaaanagctttgaaaacactgcataatccgtgtaacccagaattattatttctttgtaacttattattcagcttggcgagcgcttttgatttggcagattgataacatggtatatttacttagttggaaacaattatttctacatacttttaaaaaaatatctgctagatgaaacatacaataaaactacctgtactaaaatttgggagaactttaggtcctttaaaaagtattaatcattattagcaacatctatgataaaagtgtttattctggtttacttagaaatgataaacatttaaagtgttaacatcttatgaatgcagtgaattaatagaataaacattttgncaaaaaatcannnnanaannattagaaactttatttttgcacttaaaatgaaaaatnnctttgttttctctaaatgtgtcacagatgtagtttccgatttcttgctctttgtgtgactttctgatatc

SEQ ID NO: 671 - DNA, 602 bp, Mus musculus; identical to SEQ ID NO: 670
  misc_feature (84)..(84): n is a, c, g, or t
  misc_feature (92)..(92): n is a, c, g, or t
  misc_feature (128)..(128): n is a, c, g, or t
  misc_feature (474)..(474): n is a, c, g, or t
  misc_feature (485)..(488): n is a, c, g, or t
  misc_feature (490)..(490): n is a, c, g, or t
  misc_feature (493)..(494): n is a, c, g, or t
  misc_feature (531)..(532): n is a, c, g, or t

SEQ ID NO: 672 - DNA, 92 bp, Mus musculus
agcacaaggtgagactgcagagacgagaaggtggtgatggacaaacatgacagaatggaatcctcctgttgagcaaccatacctcactctgc

SEQ ID NO: 673 - DNA, 92 bp, Mus musculus; identical to SEQ ID NO: 672

SEQ ID NO: 674 - DNA, 362 bp, Mus musculus
  misc_feature (79)..(80): n is a, c, g, or t
  misc_feature (88)..(88): n is a, c, g, or t
  misc_feature (124)..(124): n is a, c, g, or t
  misc_feature (226)..(226): n is a, c, g, or t
  misc_feature (261)..(261): n is a, c, g, or t
  misc_feature (264)..(264): n is a, c, g, or t
  misc_feature (275)..(275): n is a, c, g, or t
  misc_feature (277)..(277): n is a, c, g, or t
  misc_feature (280)..(281): n is a, c, g, or t
  misc_feature (286)..(286): n is a, c, g, or t
  misc_feature (288)..(288): n is a, c, g, or t
  misc_feature (335)..(335): n is a, c, g, or t
tcccactgccagaaggctggcgctactctgggctgctacaacaaaggctgcaccttccgataccattacccatgtgccnnttgatgcnagattgtttgctgaatgaggagaatttctcagtganggtgccccaagcacaaggtgagactgcagagacgagaaggtggtgatggacaaacatgacagaatggaatcctcctgttgagcaaccatacctcactctgcnctaccctgcacccccgctgcgtctgcctaggccancanttcctatgttntnagnncacantnaaactggtgacaccacaggaaaagaaagatacaagatgttggaatgnccgtttccatggacacaatctccattg

SEQ ID NO: 675 - DNA, 362 bp, Mus musculus; identical to SEQ ID NO: 674
  misc_feature (79)..(80): n is a, c, g, or t
  misc_feature (88)..(88): n is a, c, g, or t
  misc_feature (124)..(124): n is a, c, g, or t
  misc_feature (226)..(226): n is a, c, g, or t
  misc_feature (261)..(261): n is a, c, g, or t
  misc_feature (264)..(264): n is a, c, g, or t
  misc_feature (275)..(275): n is a, c, g, or t
  misc_feature (277)..(277): n is a, c, g, or t
  misc_feature (280)..(281): n is a, c, g, or t
  misc_feature (286)..(286): n is a, c, g, or t
  misc_feature (288)..(288): n is a, c, g, or t
  misc_feature (335)..(335): n is a, c, g, or t

SEQ ID NO: 676 - DNA, 568 bp, Mus musculus
  misc_feature (62)..(62): n is a, c, g, or t
  misc_feature (93)..(93): n is a, c, g, or t
  misc_feature (120)..(120): n is a, c, g, or t
  misc_feature (234)..(275): n is a, c, g, or t
tattattactgcaccaggatgaatattttttttttcaagagaacagatggtactcaaaatanggaaaggtctcttaactctttctgtatttcnttacttaacaattttttattttacccnagaactgcaagtaacatttgaaccatgctgctgttgtaccttaataactcagtgatcaccagtgtttagtccattaaaaacactcttttcgaagaaaacagtttcgaagtctcnnnnnnnnnnnnnnnnnnnnnnnnnnnnnnnnnnnnnnnnnnaaggcccattttctttgggaaaacctgggaaaatgcaagtgtgggtgtgccatgtgtgttctatttgcattgaaacaatgtacttttgtgtcgtcttttttgcttttcctgacttatttcagaaattgtatagtctttggggggaaagtcttctctgttaatatatttacagttcattaaaggatatggaaaatccaaataaattacttttgaaagcagtttataatcaaggtgttaaagctatgtaaaagctgtgtcatctgcatttttatactgagccacagcagcatagt

SEQ ID NO: 677 - DNA, 568 bp, Mus musculus; identical to SEQ ID NO: 676
  misc_feature (62)..(62): n is a, c, g, or t
  misc_feature (93)..(93): n is a, c, g, or t
  misc_feature (120)..(120): n is a, c, g, or t
  misc_feature (234)..(275): n is a, c, g, or t

SEQ ID NO: 678 - DNA, 463 bp, Mus musculus
  misc_feature (229)..(229): n is a, c, g, or t
  misc_feature (242)..(243): n is a, c, g, or t
cagaacgcccagaggaagagcaggtggtgtctaaggatacaggtactgatcttggccccacagctcagttgtgaagttgccagggaagctgcactgagggctggggaggaaggccaaggccaccaagctagcaggctctctccttcaggggtcccggtgagaaactatgaagatgtctttctcttggatcctctgctaccatgtgggcagcgtgttcccctaatcctgnccaagccccctcnncaggcaatggactccaggaagctgctgctcccaccgcccatcatgtcgccctctgtgcatccgtcctcatcccaggcctgctcctccacctggctcagcgaggcagagatgatcgcccttgctggtctgctgcagatgagccagggagagcagacacccaactgcgtggcaagctctctgccttccaccagctgcccagaccctgtctctgtctctgaag

SEQ ID NO: 679 - DNA, 463 bp, Mus musculus; identical to SEQ ID NO: 678
  misc_feature (229)..(229): n is a, c, g, or t
  misc_feature (242)..(243): n is a, c, g, or t

SEQ ID NO: 680 - DNA, 239 bp, Mus musculus
  misc_feature (54)..(70): n is a, c, g, or t
  misc_feature (82)..(93): n is a, c, g, or t
  misc_feature (101)..(101): n is a, c, g, or t
  misc_feature (108)..(108): n is a, c, g, or t
tggctattgtggatgacccaagatacagaatgttcagcaaccaaggagtctgtnnnnnnnnnnnnnnnnngcctagtccttnnnnnnnnnnnncgtactgntgcaaancagtcaatgacctcgggacggtggagattgaatgcaaactggaggtgaaagtcgtagcacagtaaggatgtttgaatgtatattgtcacccaaggtgggctgtccttctgcaggctcctcctgcaaggcgt

SEQ ID NO: 681 - DNA, 239 bp, Mus musculus; identical to SEQ ID NO: 680
  misc_feature (54)..(70): n is a, c, g, or t
  misc_feature (82)..(93): n is a, c, g, or t
  misc_feature (101)..(101): n is a, c, g, or t
  misc_feature (108)..(108): n is a, c, g, or t

SEQ ID NO: 682 - DNA, 553 bp, Mus musculus
  misc_feature (26)..(26): n is a, c, g, or t
  misc_feature (40)..(55): n is a, c, g, or t
  misc_feature (57)..(58): n is a, c, g, or t
  misc_feature (61)..(64): n is a, c, g, or t
  misc_feature (79)..(106): n is a, c, g, or t
  misc_feature (120)..(134): n is a, c, g, or t
  misc_feature (194)..(210): n is a, c, g, or t
  misc_feature (222)..(233): n is a, c, g, or t
  misc_feature (241)..(241): n is a, c, g, or t
  misc_feature (248)..(248): n is a, c, g, or t
cgaagacttcaatttcacagaggccnccatgtttactcannnnnnnnnnnnnnnntnngcnnnngctggttacaatgcnnnnnnnnnnnnnnnnnnnnnnnnnnnncccaagcccaaaannnnnnnnnnnnnnnacaaagtggctattgtggatgacccaagatacagaatgttcagcaaccaaggagtctgtnnnnnnnnnnnnnnnnngcctagtccttnnnnnnnnnnnncgtactgntgcaaancagtcaatgacctcgggacggtggagattgaatgcaaactggaggtgaaagtcgtagcacagtaaggatgtttgaatgtatattgtcacccaaggtgggctgtccttctgcaggctcctcctgcaaggcgtgcctccaaacataattgattcctatttgcgagacttacaatcaagcaatcccgaggaatactgagggcagggcattgcttctagacacacccactgctttgaaatctgattgaaaatggatagtactttctggttttctcccaggcccccaagtgtggtcactttctttctttc

SEQ ID NO: 683 - DNA, 553 bp, Mus musculus; identical to SEQ ID NO: 682
  misc_feature (26)..(26): n is a, c, g, or t
  misc_feature (40)..(55): n is a, c, g, or t
  misc_feature (57)..(58): n is a, c, g, or t
  misc_feature (61)..(64): n is a, c, g, or t
  misc_feature (79)..(106): n is a, c, g, or t
  misc_feature (120)..(134): n is a, c, g, or t
  misc_feature (194)..(210): n is a, c, g, or t
  misc_feature (222)..(233): n is a, c, g, or t
  misc_feature (241)..(241): n is a, c, g, or t
  misc_feature (248)..(248): n is a, c, g, or t

SEQ ID NO: 684 - DNA, 344 bp, Mus musculus
  misc_feature (40)..(54): n is a, c, g, or t
  misc_feature (161)..(199): n is a, c, g, or t
  misc_feature (308)..(308): n is a, c, g, or t
agcctgggtgttagaggaacgcattctttttgcagaatannnnnnnnnnnnnnncctatgatgtcatctcgggcgccacggcttcccttggcaggttttaaacaagcagtctgaggtcacgatcctcagcttctcctcctttttgctcttcattaccaaannnnnnnnnnnnnnnnnnnnnnnnnnnnnnnnnnnnnnnaatgagtctcccttcaggctggagttctctgagcgagtgcattcgtgagagaatgagggaacaaacaggtacagagcatgtcatacgcgtcacgctccgcctggcaccnccccggccttacagcatgtcacatgattccagtggc

SEQ ID NO: 685 - DNA, 344 bp, Mus musculus; identical to SEQ ID NO: 684
  misc_feature (40)..(54): n is a, c, g, or t
  misc_feature (161)..(199): n is a, c, g, or t
  misc_feature (308)..(308): n is a, c, g, or t

SEQ ID NO: 686 - DNA, 594 bp, Mus musculus
  misc_feature (52)..(52): n is a, c, g, or t
  misc_feature (396)..(396): n is a, c, g, or t
  misc_feature (408)..(409): n is a, c, g, or t
  misc_feature (536)..(536): n is a, c, g, or t
cagacacctatagctccaggggatcctacaccctcttttgagcgccgtgggnatgcattccagtacacaaacctgaatacagacatacatattcatacataattaaaatttttaaaaaattagatctcttagaggaaaaaaatataaattatgacatgcaggaaccaggtgttgaggtattaagtatattcatcccatagctctcctctccccagtgggctttcatcactagggggagaagactgtctggcctctgcattacttgacagacgtgtcattgcacaattagttgaagccttccttcagaagcagagggagggatgatgggagactgcagagtagaagaaagccagccacatctaaagccaggcacagtggcaaagtctcctgcaatcnccaaatgtaggnngtggtggagcaaggagggccgggagttccgggttatccttgtctgtatggtgaactggaagtctggactacatgaggcctgtgtcaaataagcaaataaaacatttaaaagggggaaataaagttanatctgaggtgccaagaatattattttgcccgtttgaccttggcccttcatagccagga

SEQ ID NO: 687 - DNA, 594 bp, Mus musculus; identical to SEQ ID NO: 686
  misc_feature (52)..(52): n is a, c, g, or t
  misc_feature (396)..(396): n is a, c, g, or t
  misc_feature (408)..(409): n is a, c, g, or t
  misc_feature (536)..(536): n is a, c, g, or t

SEQ ID NO: 688 - DNA, 532 bp, Mus musculus
  misc_feature (33)..(33): n is a, c, g, or t
  misc_feature (103)..(103): n is a, c, g, or t
  misc_feature (105)..(106): n is a, c, g, or t
  misc_feature (109)..(109): n is a, c, g, or t
  misc_feature (112)..(112): n is a, c, g, or t
  misc_feature (114)..(115): n is a, c, g, or t
ccttgccggtagtattagtaagatagctgggcntctggtgttgccctatttgctctggctccttactgattgtgttattacctggccctttagccctctgtantnngtngananncctgattccagcaagacttctctaggagacatgcagagctgtaggacagtgcagctcagggaatagcatgatgctcacctctgctggctgttcccccaggtggacctggcaggcagggataggtgaggagggatctaacctggatgttcctggaactcagtaggcctcttcagaaagccaggcagagccatgacctgatagtggtcagtgtacagcatgaaactcacctctaataagcattatctttaaagcagtggctagcctttgaccttagcacaatatactataacttttcattataaatatacagtacctaaacatagaaagtaaaatgagaagaaaattttagaacccttaactttgtcctaattttatttgttttttagtagaattactactggtctatgtgtttgtgtc

SEQ ID NO: 689 - DNA, 532 bp, Mus musculus; identical to SEQ ID NO: 688
  misc_feature (33)..(33): n is a, c, g, or t
  misc_feature (103)..(103): n is a, c, g, or t
  misc_feature (105)..(106): n is a, c, g, or t
  misc_feature (109)..(109): n is a, c, g, or t
  misc_feature (112)..(112): n is a, c, g, or t
  misc_feature (114)..(115): n is a, c, g, or t

SEQ ID NO: 690 - DNA, 338 bp, Mus musculus
  misc_feature (217)..(231): n is a, c, g, or t
ggttctctcagtggtttgtcctttctatggtgaacgctttttgagcactttggtcgtttagactgtgtactgtgccattctctttttattcttattttgttaagctgtgttatgagttagtatagtacatattaattcttgctcttacttgtattagcttttttgaagtgttttttgtttgtttctttggatttttccaagacagggtttctttgtnnnnnnnnnnnnnnncttgaactcagcagtccttcagactctgccccccaaatgttgagattaaaggcatgggccacaactgccggaactcactgaggatcacatccctggaaggtctggct

SEQ ID NO: 691 - DNA, 338 bp, Mus musculus; identical to SEQ ID NO: 690
  misc_feature (217)..(231): n is a, c, g, or t

SEQ ID NO: 692 - DNA, 78 bp, Mus musculus
aatcacttggcttctaaatttgatgtattacttagaaaaatcaagaaacctgagttgcatgcctaaggcaacacacat

SEQ ID NO: 693 - DNA, 78 bp, Mus musculus; identical to SEQ ID NO: 692

SEQ ID NO: 694 - DNA, 355 bp, Mus musculus
  misc_feature (58)..(58): n is a, c, g, or t
  misc_feature (183)..(219): n is a, c, g, or t
agcccaggaaatgcttccaaacaaaagggaagcaagagagacacacaccccgaccctnacctgctgtgagctgctgcctgatatagaatggatcaggtccagggtaaggaggtgactcttcttgcagggtcccagatctgtcagctcactgcagtggcatgtgaaaggggggcagtgctggtnnnnnnnnnnnnnnnnnnnnnnnnnnnnnnnnnnnnncaccagatgtggcctcttatataggtgtgtccttaagcaaaatgtgccccgaagtgattccaagcctaatcgagtgtggggaaagtggattctgatggtgacgaatcggatcctctcttctaccaggctgcgaagg

SEQ ID NO: 695 - DNA, 355 bp, Mus musculus; identical to SEQ ID NO: 694
  misc_feature (58)..(58): n is a, c, g, or t
  misc_feature (183)..(219): n is a, c, g, or t

SEQ ID NO: 696 - DNA, 480 bp, Mus musculus
  misc_feature (35)..(36): n is a, c, g, or t
  misc_feature (39)..(40): n is a, c, g, or t
  misc_feature (131)..(131): n is a, c, g, or t
  misc_feature (279)..(302): n is a, c, g, or t
  misc_feature (311)..(328): n is a, c, g, or t
cactagcaggcttccccaaagcaaaagtttagganntcnngagaatccttcctgagcaagattgctgttagctctcaggccaactgaagaaagttagcgacactatgttatggggatgttggggataaaanggcacatagcacttagagtggaagcatgacgtgatagaaagtaatcagggtcacaaactccagctggctaccaagcagctgtggccccgggcaggccaaaaggaggatcaggctggggtagtgggagatttccagcttgagaagagcnnnnnnnnnnnnnnnnnnnnnnnngccctgttnnnnnnnnnnnnnnnnnnatcagatacctgccgttggagccgtccatctcacccttaggatgtgaaactactttcaatgtgtacaaataagttagtctattgtagataaggaggggcaggttccctttaagctgtttttactttattaacctgagtgatatatggtcact

SEQ ID NO: 697 - DNA, 480 bp, Mus musculus; identical to SEQ ID NO: 696
  misc_feature (35)..(36): n is a, c, g, or t
  misc_feature (39)..(40): n is a, c, g, or t
  misc_feature (131)..(131): n is a, c, g, or t
  misc_feature (279)..(302): n is a, c, g, or t
  misc_feature (311)..(328): n is a, c, g, or t

SEQ ID NO: 698 - DNA, 385 bp, Mus musculus
  misc_feature (26)..(26): n is a, c, g, or t
  misc_feature (41)..(44): n is a, c, g, or t
  misc_feature (46)..(46): n is a, c, g, or t
  misc_feature (84)..(84): n is a, c, g, or t
  misc_feature (89)..(89): n is a, c, g, or t
  misc_feature (95)..(95): n is a, c, g, or t
  misc_feature (303)..(303): n is a, c, g, or t
  misc_feature (340)..(354): n is a, c, g, or t
aggacaagtggtctctctttggggtntaaaggattgtaggnnnngncagattagcaacagggaaggatatgcactgttttcaanggaanaccttntctggtggcattagggataaaaggcctttgtagtatcccagagtcctgccttatacatggacaaacagcctggaagctccaggtatgtatatgtgtagttcgtggtcacacacagcctgacacactgtcatctgcccagtttaaccatgatgtggcatttggcacatcccactccttccgggtaaatgggagggtttcttccccatcngctgtaaggctgctgtcctgtgtccagcccaacccannnnnnnnnnnnnnncaaaggagatggcttctttctgagaattgtc

SEQ ID NO: 699 - DNA, 385 bp, Mus musculus; identical to SEQ ID NO: 698
  misc_feature (26)..(26): n is a, c, g, or t
  misc_feature (41)..(44): n is a, c, g, or t
  misc_feature (46)..(46): n is a, c, g, or t
  misc_feature (84)..(84): n is a, c, g, or t
  misc_feature (89)..(89): n is a, c, g, or t
  misc_feature (95)..(95): n is a, c, g, or t
  misc_feature (303)..(303): n is a, c, g, or t
  misc_feature (340)..(354): n is a, c, g, or t

SEQ ID NO: 700 - DNA, 392 bp, Mus musculus
cttgcctagtgtttacaagtgattttaagtgaaagtaactacaaataattttaagtgtaaatacaagaagaagatggcacctaatcttgtaatggttctttgagcagacatgatctgagcgctcttatgcaggaggtcgacatccaggaactgcccacaccagcacagaaacagcacacaggctttacaagttagctggtcacagctgagctactcatatatacctcagaccaaagacagcagccaagaccaatatggagacaaacatgccacgctctagtaacgaattatggacacagaaatgtgaatttcttattatttttctgtcataaaatagtgatacctttgtttccttttgcccagccatttgaaaacgttcagccctaataaag

SEQ ID NO: 701 - DNA, 392 bp, Mus musculus; identical to SEQ ID NO: 700

SEQ ID NO: 702 - DNA, 347 bp, Mus musculus
  misc_feature (322)..(322): n is a, c, g, or t
aggatttggccactgcatataacaacagggggcaaaccaagtacttcagcgttgatttttatgaagccatggacgactacacatctgccatagaaatcctgcccagctttgaagttccctattataacagaggcctgatacgctacaggctggggtattttgacgaagctttggaagatttcaagaaggcactagacctcaatcctggatttcaagatgctgttttgagcttaaaacagaccattttagacaaagaagaaaagcaaagacgaaatgccgagaaaagttactgaaacctttagcttattgagattttaactcnagatccttaaatctgcatttgattg

SEQ ID NO: 703 - DNA, 347 bp, Mus musculus; identical to SEQ ID NO: 702
  misc_feature (322)..(322): n is a, c, g, or t

SEQ ID NO: 704 - DNA, 399 bp, Mus musculus
  misc_feature (202)..(202): n is a, c, g, or t
  misc_feature (218)..(218): n is a, c, g, or t
  misc_feature (310)..(310): n is a, c, g, or t
aagccccagagaaaatcaccccagggtgtccctgccccagagaggccctgccctgggatgtttcacgccttaaaaaaggtgtgtgtgtgtgtgtgtgtgtgtgtgtccaatgtttttaaaatggccgaggctggggaggacagggtttcttttcctcatagttctttaaaactttttattttatttatttattttttttacnaaataccatttcagtncccacttcttcccctacagtacaggagtcgctcaccctcaggtggggtcggggttgggtcgggagtgggggtactggtccaagaaagtgcangacgtaggggaggggagcaggtttgagcaccatgagagcccggctggagccgcgggcgggcggagacagacgggccaagcccggacata

SEQ ID NO: 705 - DNA, 399 bp, Mus musculus; identical to SEQ ID NO: 704
  misc_feature (202)..(202): n is a, c, g, or t
  misc_feature (218)..(218): n is a, c, g, or t
  misc_feature (310)..(310): n is a, c, g, or t

SEQ ID NO: 706 - DNA, 507 bp, Mus musculus
  misc_feature (223)..(224): n is a, c, g, or t
  misc_feature (226)..(226): n is a, c, g, or t
  misc_feature (228)..(230): n is a, c, g, or t
  misc_feature (232)..(236): n is a, c, g, or t
  misc_feature (238)..(243): n is a, c, g, or t
  misc_feature (245)..(249): n is a, c, g, or t
  misc_feature (251)..(252): n is a, c, g, or t
  misc_feature (254)..(254): n is a, c, g, or t
  misc_feature (257)..(264): n is a, c, g, or t
  misc_feature (266)..(266): n is a, c, g, or t
  misc_feature (268)..(269): n is a, c, g, or t
  misc_feature (482)..(482): n is a, c, g, or t
gtttcctgtgtttggcactgggaatggtgaaaataaaacttactcaagtacagaagaagtggaagtggctgagtgtcagtgatattcccccagaatgtatttttcttacctcggcatgtactgtagtcacttgatatttgtatatgttgctagaatttaggctgttgaaaatagtgagattctaatgtgtttttaataaattatatgtgtgtgtcttgctcanntntnnntnnnnnannnnnnannnnntnnanatnnnnnnnnanannatgccaaatttctcaaagttgacaacagtcacattttatgaccagtattatagtgggtatagatagcatcattggtccccctgccactgtccctgccggcaactccacaaccctcaagcctaccttatggaagtgaatctgggcagcccagctctgtgtggctatagagtaaaggggcacaccccatcagcatggagagccagccagtgccancgtccccatcagttaggtgctggac

SEQ ID NO: 707 - DNA, 507 bp, Mus musculus; identical to SEQ ID NO: 706
  misc_feature (223)..(224): n is a, c, g, or t
  misc_feature (226)..(226): n is a, c, g, or t
  misc_feature (228)..(230): n is a, c, g, or t
  misc_feature (232)..(236): n is a, c, g, or t
  misc_feature (238)..(243): n is a, c, g, or t
  misc_feature (245)..(249): n is a, c, g, or t
  misc_feature (251)..(252): n is a, c, g, or t
  misc_feature (254)..(254): n is a, c, g, or t
  misc_feature (257)..(264): n is a, c, g, or t
  misc_feature (266)..(266): n is a, c, g, or t
  misc_feature (268)..(269): n is a, c, g, or t
  misc_feature (482)..(482): n is a, c, g, or t

SEQ ID NO: 708 - DNA, 512 bp, Mus musculus
  misc_feature (52)..(52): n is a, c, g, or t
  misc_feature (59)..(60): n is a, c, g, or t
  misc_feature (68)..(68): n is a, c, g, or t
agagacagtcactcttcatattgacccagatggtggcgaggctccaggcccntcccagnnctgatgcnacacattggagataagggtaaggcaagtggcccagagccttggaccatgcctggtaccagcatcaaccctggaacccacagcttacctcggacacctcccacgccctgttcttctccagcctaggactgagccttccttgctttcctgcccggtcctgactacctcactggacctgttctctgccgggaggatgggggaagtacctaagtacctgcagagttggagtacgctgacatcatttcagaagaaccctggacaggagactccaactttggactccacctctcaggccctgtgggggctctagaaacaagatttggacttgggtgttttccctgagacatatccccattgagggtcttgtccagcgctgcacctaagacatgtgttgacctgtcatcagctctgcaggaattcaggaccacctctgtggtggacatggc

SEQ ID NO: 709 - DNA, 512 bp, Mus musculus; identical to SEQ ID NO: 708
  misc_feature (52)..(52): n is a, c, g, or t
  misc_feature (59)..(60): n is a, c, g, or t
  misc_feature (68)..(68): n is a, c, g, or t

SEQ ID NO: 710 - DNA, 483 bp, Mus musculus
  misc_feature (28)..(28): n is a, c, g, or t
  misc_feature (59)..(59): n is a, c, g, or t
  misc_feature (63)..(63): n is a, c, g, or t
  misc_feature (211)..(225): n is a, c, g, or t
ccagctcgcgataagaggagccggcggntggagaggggatgaagatggcggacgcgaancagnaagcggaacgagcagctgaagcgctggatcggctccgagacggacctcgagccgcccgtggtgaagcgccagaagaccaaggtgaagttcgacgatggcgccgtcttcctcgccgcctgctccagcggcgacacggacgaggtcctcnnnnnnnnnnnnnnnggcgccgacatcaattacgccaatgtggacggactcaccgccctgcaccaggcttgcattgatgacaatgttgatatggtgaagtttctggtagaaaatggagcaaatatcaatcaacctgacaatgaaggctggataccactccatgcagctgcttcctgtggatatctcgatattgcagagtttttgattggtcaaggagcacatgtaggagctgtcaacagtgaaggagacacacctttagatattgcagaggag

SEQ ID NO: 711 - DNA, 483 bp, Mus musculus; identical to SEQ ID NO: 710
  misc_feature (28)..(28): n is a, c, g, or t
  misc_feature (59)..(59): n is a, c, g, or t
  misc_feature (63)..(63): n is a, c, g, or t
  misc_feature (211)..(225): n is a, c, g, or t

SEQ ID NO: 712 - DNA, 397 bp, Mus musculus
  misc_feature (157)..(214): n is a, c, g, or t
  misc_feature (295)..(334): n is a, c, g, or t
tctgccctctgcaggaaaacagctctggcgaggacattttcaccaagcttctggacctgagggagcccacgtggaagcagtggagagaattcctcgtcaagtactcctttcttccgtaccagctgatcgcggagtttgcctgggactggctggaggnnnnnnnnnnnnnnnnnnnnnnnnnnnnnnnnnnnnnnnnnnnnnnnnnnnnnnnnnngttgttctctttttggaggatctggtcgagaagtgagctgaagtaagtgcctttcagtggtagatggttggtaaggaaatnnnnnnnnnnnnnnnnnnnnnnnnnnnnnnnnnnnnnnnncatgggggatgaggttgcctagcgcccccatcaggcagtctacagtgactccaacctcagagc

SEQ ID NO: 713 - DNA, 397 bp, Mus musculus; identical to SEQ ID NO: 712
  misc_feature (157)..(214): n is a, c, g, or t
  misc_feature (295)..(334): n is a, c, g, or t

SEQ ID NO: 714 - DNA, 91 bp, Mus musculus
gtagatccctattcttgctctacgctctcaagagctcacccagacttggcttgctatacctgtacctgtttgactacacagactgcttcct

SEQ ID NO: 715 - DNA, 91 bp, Mus musculus; identical to SEQ ID NO: 714

SEQ ID NO: 716 - DNA, 314 bp, Mus musculus
  misc_feature (63)..(82): n is a, c, g, or t
  misc_feature (146)..(146): n is a, c, g, or t
  misc_feature (172)..(172): n is a, c, g, or t
gtctccaatccagagcagtaccattatcaacccttcacatgtcagggatacccctgtccctcnnnnnnnnnnnnnnnnnnnnctgtaatcttagcacttggaaggatggggcagaagtatggttggtttgagagagaatgagggangaggagggaggtactttgctgtgaanccatctgaagtcgagctgtgatgagttaggtaccatctcttaagtcaccagtcaggctagctcagtccccagctacaaggccctggcaacagtcacatctaccagcctttgttgtcctccaagccccatgcttctggtctgt

SEQ ID NO: 717 - DNA, 314 bp, Mus musculus; identical to SEQ ID NO: 716
  misc_feature (63)..(82): n is a, c, g, or t
  misc_feature (146)..(146): n is a, c, g, or t
  misc_feature (172)..(172): n is a, c, g, or t

SEQ ID NO: 718 - DNA, 513 bp, Mus musculus
  misc_feature (26)..(62): n is a, c, g, or t
  misc_feature (151)..(151): n is a, c, g, or t
  misc_feature (418)..(432): n is a, c, g, or t
agttgtgaactggagtgacggcaccnnnnnnnnnnnnnnnnnnnnnnnnnnnnnnnnnnnnnaggaggcatctcggtgcttacactcccacttagagcgatgtcagctgcccgtagtgtgggttgaaggtgggctgcatggacacaggtcncagatctagctacctcctaacttgcttcccagaagggttttctttttctctttttttccccttcctacttgtaacaacccaaagtaactgaggattaggctttgtcattgcaaattttggtgccaaaggcatatgccgtggcaggaggttagtgaggtaaccctcctgtgctcattagtgaggtaggggtgtccagcctgccccaggcgagtcacagcgtcagaacagtagtttctgctacctgcctgacattgcaaggcaggcacnnnnnnnnnnnnnnnctgaaaaagcattctctgcctttgtctttccctctgtttgcagagccacttccacattccaatttctctgtttaggaactg

SEQ ID NO: 719 - DNA, 513 bp, Mus musculus; identical to SEQ ID NO: 718
  misc_feature (26)..(62): n is a, c, g, or t
  misc_feature (151)..(151): n is a, c, g, or t
  misc_feature (418)..(432): n is a, c, g, or t

SEQ ID NO: 720 - DNA, 347 bp, Mus musculus
  misc_feature (45)..(45): n is a, c, g, or t
  misc_feature (72)..(72): n is a, c, g, or t
tcttgtggatcgagttcctgtggaggaagctaacacagcggtaancaaatgtggactgacagaggacacagngccattcgagaaactgtcagaaactgagaatcacctcagaacacgctgagaaggagagctaaggaggtgaggcctgggttgtgggaggttggcacctgacagcagtggttcccactgctgggttctcttctggttttgattgtctacgctcaggcttcagagccctgggcatgagaaaaaaaaaagggagaatgaatacgttagtattccatgaaggcatagaagcaggtatgtgggaatggctgtcgttccatcttctgggtagtcatggctgt

SEQ ID NO: 721 - DNA, 347 bp, Mus musculus; identical to SEQ ID NO: 720
  misc_feature (45)..(45): n is a, c, g, or t
  misc_feature (72)..(72): n is a, c, g, or t

SEQ ID NO: 722 - DNA, 386 bp, Mus musculus
  misc_feature (201)..(201): n is a, c, g, or t
  misc_feature (284)..(284): n is a, c, g, or t
  misc_feature (330)..(330): n is a, c, g, or t
gagtaattcctagttgctctcataaatcctcatcctccatcacaatggagtaaatatattaaatctgaatatctttgctcaccaaattacttagctccatttctcagtggggaaatataaagcaggcagagctggccttcaattatacacttaactccttcaagccctttttgctttatttcttaggggagactgtgtganagagaaacaacctagtccctcctcatcttttggagccatgatgctcacttaggaattacaggaaaagaatggcttggcttggncaggtcatgtgatctgcctaacgtgtttcattccttcaaacacagnctgagaaaaaagggagtttcatcatttaaataccatcaatgggaacggtctcattt

SEQ ID NO: 723 - DNA, 386 bp, Mus musculus; identical to SEQ ID NO: 722
  misc_feature (201)..(201): n is a, c, g, or t
  misc_feature (284)..(284): n is a, c, g, or t
  misc_feature (330)..(330): n is a, c, g, or t

SEQ ID NO: 724 - DNA, 546 bp, Mus musculus
  misc_feature (270)..(283): n is a, c, g, or t
  misc_feature (329)..(329): n is a, c, g, or t
  misc_feature (345)..(345): n is a, c, g, or t
  misc_feature (483)..(499): n is a, c, g, or t
cagtgttgtcttgtataaagttctctatagtcagcaactatctgctgtttttggttttacatcttttccttatgctctaagttcttaacacatagttttggacctcaaaataacattttagagttattctaggctcaatagtttttgctttagataattattacattttcctaaatttgtaattgctttattctgtcagatcttttaaataatatatattcatttttaagggaatatctgatgagttttggtaaatgtgaatctccatgnnnnnnnnnnnnnnattgagaaaggggatattttatccttttcagccccttgtatcactnttcctgatctggtacntgagcaaccgctgatctgctttttctcttgacatcttaatgtacctttttaaaaattcatatgatagaatcatagcctaattgttaaatgtaccttctttcactcaacaaaatgtatttaatatttaagatctgtccnnnnnnnnnnnnnnnnnagcagtatattccttcaattgttgagaagttccctgtagtatggtct

SEQ ID NO: 725 - DNA, 546 bp, Mus musculus; identical to SEQ ID NO: 724
  misc_feature (270)..(283): n is a, c, g, or t
  misc_feature (329)..(329): n is a, c, g, or t
  misc_feature (345)..(345): n is a, c, g, or t
  misc_feature (483)..(499): n is a, c, g, or t

SEQ ID NO: 726 - DNA, 587 bp, Mus musculus
  misc_feature (44)..(44): n is a, c, g, or t
  misc_feature (57)..(57): n is a, c, g, or t
  misc_feature (70)..(80): n is a, c, g, or t
  misc_feature (98)..(99): n is a, c, g, or t
  misc_feature (253)..(273): n is a, c, g, or t
  misc_feature (467)..(467): n is a, c, g, or t
  misc_feature (494)..(494): n is a, c, g, or t
  misc_feature (519)..(537): n is a, c, g, or t
ccagaagctggtggagcaccgcgtcatccccgagggcttcgtcnacagcgcggtcancaacgactaccannnnnnnnnnngcatcgtgtcccacgttnnccccatccacatcttcgagcgccccatcgtgtccgtgtctttcttcagcgactcggcactttgcttcggctgcaagttccagttcaagcccatccgggtgtcggaacctgtgctttctctgccggtgcgcagggggagcgtgactgtgctcagnnnnnnnnnnnnnnnnnnnnncactcactgcatacggcctcaggacattaaggaacgccgggcggtcatcattctcaggaagacaagattagatgcaccgcgattggaaacaaaatccctgagcagctccacattgccacccagctatgcttcagatcgcctgtcaggaaacaccagagaccctgcgctgaaacccaaaaggtcccaccgcaagncagaccctgatgctgcccacaggcccnggatcctggaaatggacaaagaagnnnnnnnnnnnnnnnnnnncctgcccacacaccggcggagggggagttttagctctgagaactattggc

SEQ ID NO: 727 - DNA, 587 bp, Mus musculus; identical to SEQ ID NO: 726
  misc_feature (44)..(44): n is a, c, g, or t
  misc_feature (57)..(57): n is a, c, g, or t
  misc_feature (70)..(80): n is a, c, g, or t
  misc_feature (98)..(99): n is a, c, g, or t
  misc_feature (253)..(273): n is a, c, g, or t
  misc_feature (467)..(467): n is a, c, g, or t
  misc_feature (494)..(494): n is a, c, g, or t
  misc_feature (519)..(537): n is a, c, g, or t

SEQ ID NO: 728 - DNA, 586 bp, Mus musculus
  misc_feature (213)..(213): n is a, c, g, or t
  misc_feature (223)..(224): n is a, c, g, or t
  misc_feature (445)..(459): n is a, c, g, or t
acgagcggagtctgaagaggccatcgcggccgtgagccggtgtcgtcccaatacactggcagagttccgcctcggcttccagcccgcggttccctcaccggacggtcgcctgcgcgccatgcagccgccgcctgccccgcgcgcgtaggctcgccacaggccatgctgccccttctcgccgcgctactggccgccgcctgccagctgccgccngcgcacggcnnggccacggatgcgcccggccttgcagggacgcccccaaacgcctcggccaatgcgtccttcaccaacgaacactccaccccgcgtctgctggcatcggcggcatcggcgcccccagagcgcgcgggcccagaggaggctccggcggcgccctgcaacatcagcgtgcaacgacagatgctgagctcgctgctcgtgcgctggggccgcccgcggggcttgnnnnnnnnnnnnnnnctcttctctaccaacgcgcacggccgcgccttcttcgccgccgccttccaccgcgtcgggccaccactgctcatcgagcatctggggctggcggcgggcggcgcgcagcaagacctgcgcctgtgcg

SEQ ID NO: 729 - DNA, 586 bp, Mus musculus; identical to SEQ ID NO: 728
  misc_feature (213)..(213): n is a, c, g, or t
  misc_feature (223)..(224): n is a, c, g, or t
  misc_feature (445)..(459): n is a, c, g, or t

SEQ ID NO: 730 - DNA, 276 bp, Mus musculus
  misc_feature (106)..(106): n is a, c, g, or t
ggaaatcattcttaacttagaagactctttttcagattcttgttactccagggagactagttttacctttgagccccagcaatgggtagtttcagctgccaggggntgcaatccaccttgtcctcagtgttttccactctagggattcaggacaagtctgtccacgtctccttggcgtgggtgtttgtccagtgaacagacactcagttctaatctcatgtgtctgcatttgtttctgagtctatatttgctttctcagagcatagcaaggtcaac

SEQ ID NO: 731 - DNA, 276 bp, Mus musculus; identical to SEQ ID NO: 730
  misc_feature (106)..(106): n is a, c, g, or t

SEQ ID NO: 732 - DNA, 395 bp, Mus musculus
  misc_feature (30)..(30): n is a, c, g, or t
  misc_feature (32)..(39): n is a, c, g, or t
  misc_feature (41)..(46): n is a, c, g, or t
  misc_feature (58)..(58): n is a, c, g, or t
  misc_feature (60)..(60): n is a, c, g, or t
  misc_feature (111)..(111): n is a, c, g, or t
  misc_feature (126)..(126): n is a, c, g, or t
  misc_feature (317)..(317): n is a, c, g, or t
  misc_feature (343)..(343): n is a, c, g, or t
  misc_feature (352)..(353): n is a, c, g, or t
  misc_feature (355)..(355): n is a, c, g, or t
  misc_feature (370)..(370): n is a, c, g, or t
agctggttcaagtgaacagaaggtctgggngnnnnnnnncnnnnnngacaggggtccnanttgagcaccgtgggaggctctgagagtgtagcttgggtctagcctactggnaccggcagccatgangagcactctggacctggacaagggctgcaccgtggaggagctgctccgtggttgcatcgaagcgtttgatgactccggaaaggtgcgagatccacagctagtgcgcatgtttctcatgatgcacccctggtacataccttcctctcagctggcttcgaaactgctccacttctatcagcaatcccggaagnacaactccaattctctacagatgaanacgtgtcanntngtcaggtactggatntcagccttcccagcagagttcgact

SEQ ID NO: 733 - DNA, 395 bp, Mus musculus; identical to SEQ ID NO: 732
  misc_feature (30)..(30): n is a, c, g, or t
  misc_feature (32)..(39): n is a, c, g, or t
  misc_feature (41)..(46): n is a, c, g, or t
  misc_feature (58)..(58): n is a, c, g, or t
  misc_feature (60)..(60): n is a, c, g, or t
  misc_feature (111)..(111): n is a, c, g, or t
  misc_feature (126)..(126): n is a, c, g, or t
  misc_feature (317)..(317): n is a, c, g, or t
  misc_feature (343)..(343): n is a, c, g, or t
  misc_feature (352)..(353): n is a, c, g, or t
  misc_feature (355)..(355): n is a, c, g, or t
  misc_feature (370)..(370): n is a, c, g, or t

SEQ ID NO: 734 - DNA, 360 bp, Mus musculus
  misc_feature (26)..(26): n is a, c, g, or t
  misc_feature (336)..(336): n is a, c, g, or t
ccatcttggacagcaagcggctccgntgaggactgtactatggctctctcgtggttcagcatggggctcacagctcacaactggacagcaggcagcccactgagggttatgctgcagttccctggtacttcctggaggatcccagtgaacactttggtcaaaacaacgtctgacacacttcccttcttcccctagcccagcaaggccttaacctgatagttgggacggggctagaagaaagatgcgtgttctcagataagttggtctgacctcaggcagatgccccatgccactgcctctcactgtgtgcaataggggttctctgagacatggaantaccctgatccaggatctgcaaga

SEQ ID NO: 735 - DNA, 361 bp, Mus musculus
  misc_feature (26)..(26): n is a, c, g, or t
  misc_feature (336)..(336): n is a, c, g, or t
ccatcttggacagcaagcggctccgntgaggactgtactatggctctctcgtggttcagcatggggctcacagctcacaactggacagcaggcagcccactgagggttatgctgcagttccctggtacttcctggaggatcccagtgaacactttggtcaaaacaacgtctgacacacttcccttcttcccctagcccagcaaggccttaacctgatagttgggacggggctagaagaaagatgcgtgttctcagataagttggtctgacctcaggcagatgccccatgccactgcctctcactgtgtgcaataggggttctctgagacatggaantaccctgatccaggatctgcaagac

SEQ ID NO: 736 - DNA, 361 bp, Mus musculus; identical to SEQ ID NO: 735
  misc_feature (26)..(26): n is a, c, g, or t
  misc_feature (336)..(336): n is a, c, g, or t

SEQ ID NO: 737 - DNA, 294 bp, Mus musculus
  misc_feature (39)..(40): n is a, c, g, or t
  misc_feature (42)..(42): n is a, c, g, or t
  misc_feature (44)..(46): n is a, c, g, or t
  misc_feature (51)..(55): n is a, c, g, or t
  misc_feature (59)..(59): n is a, c, g, or t
  misc_feature (63)..(63): n is a, c, g, or t
  misc_feature (65)..(65): n is a, c, g, or t
  misc_feature (67)..(67): n is a, c, g, or t
  misc_feature (69)..(69): n is a, c, g, or t
  misc_feature (71)..(73): n is a, c, g, or t
  misc_feature (79)..(84): n is a, c, g, or t
  misc_feature (97)..(97): n is a, c, g, or t
  misc_feature (101)..(101): n is a, c, g, or t
  misc_feature (106)..(108): n is a, c, g, or t
  misc_feature (111)..(111): n is a, c, g, or t
  misc_feature (113)..(113): n is a, c, g, or t
  misc_feature (127)..(127): n is a, c, g, or t
  misc_feature (130)..(130): n is a, c, g, or t
  misc_feature (132)..(132): n is a, c, g, or t
  misc_feature (135)..(135): n is a, c, g, or t
  misc_feature (151)..(151): n is a, c, g, or t
  misc_feature (154)..(154): n is a, c, g, or t
  misc_feature (158)..(158): n is a, c, g, or t
  misc_feature (161)..(161): n is a, c, g, or t
  misc_feature (163)..(163): n is a, c, g, or t
  misc_feature (166)..(166): n is a, c, g, or t
  misc_feature (170)..(170): n is a, c, g, or t
  misc_feature (173)..(173): n is a, c, g, or t
  misc_feature (187)..(188): n is a, c, g, or t
  misc_feature (190)..(211): n is a, c, g, or t
  misc_feature (261)..(261): n is a, c, g, or t
  misc_feature (268)..(268): n is a, c, g, or t
gaagctgatccagtttgggctgatgaagaaccttatccnnanannncagannnnnccantccnantntntnnngaggannnnnnccaccctgccagncttnacacnnnctntnacagctatgatganatntnctncaagacaggcatgagntancatnagntngangagngantagaaaatgacccnnannnnnnnnnnnnnnnnnnnnnnggctggctagctggaacatgttactatggctacttgcccctactaaggcntccttgntccactggagctagacaagtatggtt

SEQ ID NO: 738 - DNA, 206 bp, Mus musculus
  misc_feature (58)..(58): n is a, c, g, or t
  misc_feature (91)..(91): n is a, c, g, or t
  misc_feature (99)..(99): n is a, c, g, or t
  misc_feature (101)..(101): n is a, c, g, or t
  misc_feature (132)..(132): n is a, c, g, or t
  misc_feature (159)..(159): n is a, c, g, or t
  misc_feature (161)..(161): n is a, c, g, or t
accatagaagagagcacgtgcgctgagcgcccaggagataaagggagaggcagcaggntcaacagagcttcggagcaaccacctgggcatncaaggacntntttagcaagggctaacatacacattgttatntaataaaaaaagtcaattcattttccntntctgtaaactgttgtttcaagtattaaagcactgttgtaccacaa

SEQ ID NO: 739 - DNA, 206 bp, Mus musculus; identical to SEQ ID NO: 738
  misc_feature (58)..(58): n is a, c, g, or t
  misc_feature (91)..(91): n is a, c, g, or t
  misc_feature (99)..(99): n is a, c, g, or t
  misc_feature (101)..(101): n is a, c, g, or t
  misc_feature (132)..(132): n is a, c, g, or t
  misc_feature (159)..(159): n is a, c, g, or t
  misc_feature (161)..(161): n is a, c, g, or t

SEQ ID NO: 740 - DNA, 269 bp, Mus musculus
  misc_feature (89)..(89): n is a, c, g, or t
  misc_feature (111)..(111): n is a, c, g, or t
  misc_feature (142)..(142): n is a, c, g, or t
gctcgagtcatctcccgggacactgaaacacagagatattacctgctaagtcacacacctgcagcctgcagtctcaccctgggtcctgnatatggaggaaatcacctgtgncctttctcctgctgctagcaggtctgccggnccttggaagccagtgacccagttgataaagacagtcccttctactatgactgggagagcctgcagctgggaggattgatttttggagggctcctgtgcatcgctggaattgccatggccctgagtgg

SEQ ID NO: 741 - DNA, 269 bp, Mus musculus; identical to SEQ ID NO: 740
  misc_feature (89)..(89): n is a, c, g, or t
  misc_feature (111)..(111): n is a, c, g, or t
  misc_feature (142)..(142): n is a, c, g, or t

SEQ ID NO: 742 - DNA, 406 bp, Mus musculus
  misc_feature (26)..(26): n is a, c, g, or t
  misc_feature (227)..(227): n is a, c, g, or t
  misc_feature (334)..(334): n is a, c, g, or t
gaacagaacagcatcaagactgtganccagctgcagcagctgttcggattacactcactctctttgaaccagatcacaaacggtgtccagagttcttctacccagagttggtaaagaatatccgcgggaaggtaaaaggccttcatcctggagacaagaaaaaagatgtcttggatcctttcaatgatgaagaaaaagaaaggcataaggtggaggcccttgcacgnaaatttgaagaaaaatatggtggaaagaaacgtaggaaagaccgaatacaggacttgattgatatggggtatggctatgatgaatcggattctttcatcgataactntgaggcgtatgatgaacttgttcctgcttctttgactacaaagtatggaggattttacatcaactcaggaac

SEQ ID NO: 743 - DNA, 406 bp, Mus musculus; identical to SEQ ID NO: 742
  misc_feature (26)..(26): n is a, c, g, or t
  misc_feature (227)..(227): n is a, c, g, or t
  misc_feature (334)..(334): n is a, c, g, or t

SEQ ID NO: 744 - DNA, 345 bp, Mus musculus
tcctgtcgtcttgttagcatgattcatgtatttatatagatccgattattttaatttttgctttctttgtgtaaattttatgtacagatttgattttttgtttttttttgtttgtttgtttgttttcccccctctcctagtttttacctaggttttcaggacgcctcgtgtttttgttttctgctggatctgtgtggtggtgttagcgtcgtttgcctagcatctgattttctgatgtaaccagggtttcacgctgttcttttcctctgaagtatgacatttcattgacacatttcggtccagtgtagctgtacatatggggtgtggacgacctgttactggaca

SEQ ID NO: 745 - DNA, 345 bp, Mus musculus; identical to SEQ ID NO: 744

SEQ ID NO: 746 - DNA, 330 bp, Mus musculus
  misc_feature (57)..(77): n is a, c, g, or t
  misc_feature (87)..(138): n is a, c, g, or t
  misc_feature (201)..(201): n is a, c, g, or t
  misc_feature (259)..(275): n is a, c, g, or t
  misc_feature (277)..(278): n is a, c, g, or t
  misc_feature (281)..(281): n is a, c, g, or t
  misc_feature (290)..(290): n is a, c, g, or t
  misc_feature (299)..(299): n is a, c, g, or t
  misc_feature (302)..(302): n is a, c, g, or t
acccacttctgtgcttgtgactggggtccaagtgagctcaagaatcttcatggtgtnnnnnnnnnnnnnnnnnnnnnaacccatccnnnnnnnnnnnnnnnnnnnnnnnnnnnnnnnnnnnnnnnnnnnnnnnnnnnncactcgctattccttctacacattcagtctcctcgaccacttgccgcacttcattaaatgggncagatacaatttgtttatcatcttatatcccgttggagttgctggggaacttctcacnnnnnnnnnnnnnnnnncnntangtaaagaantcaggaatnttntcagtacggcttcccaacaagtacaatg

SEQ ID NO: 747 - DNA, 330 bp, Mus musculus; identical to SEQ ID NO: 746
  misc_feature (57)..(77): n is a, c, g, or t
  misc_feature (87)..(138): n is a, c, g, or t
  misc_feature (201)..(201): n is a, c, g, or t
  misc_feature (259)..(275): n is a, c, g, or t
  misc_feature (277)..(278): n is a, c, g, or t
  misc_feature (281)..(281): n is a, c, g, or t
  misc_feature (290)..(290): n is a, c, g, or t
  misc_feature (299)..(299): n is a, c, g, or t
  misc_feature (302)..(302): n is a, c, g, or t

SEQ ID NO: 748 - DNA, 279 bp, Mus musculus
  misc_feature (207)..(207): n is a, c, g, or t
atggggaatagtctcgtggatttaaatatagacaaaaatacatttaagtttatcttttgaagacaacaaagagggcttgaatggatgtgtgtggggcttaagtcatgctgcagattggagacagggcctgaaggaacatcgaccatcactgaaatccccaggatctgggagcaacaccatagctgccaagggtctaatttaaatctntcctactcactggtcaacatattggactctggtgttaatataatgttaaaatagctgcttacatggttaaaa

SEQ ID NO: 749 - DNA, 279 bp, Mus musculus; identical to SEQ ID NO: 748
  misc_feature (207)..(207): n is a, c, g, or t

SEQ ID NO: 750 - DNA, 155 bp, Mus musculus
  misc_feature (103)..(117): n is a, c, g, or t
cacgaggaaggcggagggaagaggcacagatggaggctcggaggaaagcatgcgcctctctgctccgcgccaggctcctgcttcagctcgcccagtctcagcnnnnnnnnnnnnnnntggagaagaacttgaggactcagcaggaaattgcaggg

SEQ ID NO: 751 - DNA, 155 bp, Mus musculus; identical to SEQ ID NO: 750
  misc_feature (103)..(117): n is a, c, g, or t

SEQ ID NO: 752 - DNA, 448 bp, Mus musculus
  misc_feature (26)..(26): n is a, c, g, or t
  misc_feature (100)..(102): n is a, c, g, or t
  misc_feature (371)..(371): n is a, c, g, or t
  misc_feature (374)..(374): n is a, c, g, or t
  misc_feature (380)..(380): n is a, c, g, or t
  misc_feature (391)..(391): n is a, c, g, or t
  misc_feature (408)..(408): n is a, c, g, or t
  misc_feature (419)..(419): n is a, c, g, or t
ccaagaagtacctcattgcccgtggnaagctggactgggctgagggtcctacagcaggacctgccccccgccgctctgattccctagtgaggagccggannncatccttgggggaattactcctgcggcatgcacacagcccaaccagggcccgacaggcggtgcaggttctccaacctgggcgagatggaacaggacttggactaggtgggggctctccaggggcttcaactccagttctacttccccggggcggggcttctgagcgccaaggtgaggctcttcgagtcaagaatgctgtctactgtgcagtcattttccctgagtttctcaaggagttggctgccatctcccaggcccatgctgtcacntcncctttnttgttggatanttcagaggaggtatctnttcctcccatntcaggctttgggcccctcaatccttagtt

SEQ ID NO: 753 - DNA, 448 bp, Mus musculus; identical to SEQ ID NO: 752
  misc_feature (26)..(26): n is a, c, g, or t
  misc_feature (100)..(102): n is a, c, g, or t
  misc_feature (371)..(371): n is a, c, g, or t
  misc_feature (374)..(374): n is a, c, g, or t
  misc_feature (380)..(380): n is a, c, g, or t
  misc_feature (391)..(391): n is a, c, g, or t
  misc_feature (408)..(408): n is a, c, g, or t
  misc_feature (419)..(419): n is a, c, g, or t

SEQ ID NO: 754 - DNA, 514 bp, Mus musculus
  misc_feature (33)..(54): n is a, c, g, or t
  misc_feature (67)..(67): n is a, c, g, or t
  misc_feature (106)..(106): n is a, c, g, or t
  misc_feature (120)..(120): n is a, c, g, or t
  misc_feature (199)..(199): n is a, c, g, or t
  misc_feature (205)..(205): n is a, c, g, or t
  misc_feature (207)..(207): n is a, c, g, or t
  misc_feature (212)..(226): n is a, c, g, or t
  misc_feature (263)..(278): n is a, c, g, or t
  misc_feature (311)..(311): n is a, c, g, or t
  misc_feature (314)..(314): n is a, c, g, or t
  misc_feature (317)..(318): n is a, c, g, or t
  misc_feature (320)..(320): n is a, c, g, or t
  misc_feature (322)..(322): n is a, c, g, or t
  misc_feature (328)..(328): n is a, c, g, or t
  misc_feature (330)..(340): n is a, c, g, or t
  misc_feature (346)..(346): n is a, c, g, or t
  misc_feature (348)..(350): n is a, c, g, or t
  misc_feature (354)..(354): n is a, c, g, or t
  misc_feature (357)..(357): n is a, c, g, or t
  misc_feature (360)..(360): n is a, c, g, or t
  misc_feature (362)..(362): n is a, c, g, or t
  misc_feature (383)..(383): n is a, c, g, or t
  misc_feature (385)..(399): n is a, c, g, or t
  misc_feature (403)..(403): n is a, c, g, or t
  misc_feature (405)..(405): n is a, c, g, or t
  misc_feature (425)..(425): n is a, c, g, or t
  misc_feature (427)..(445): n is a, c, g, or t
tcacggtctcgcaccaaagccaaggcccggtcnnnnnnnnnnnnnnnnnnnnnncaggccgcacagngtccctcggcccactcagcccactcggccagcatctctncctgtggagagccngaggttcctcccaggaacgctccaggggggtttctcaggaaaaagatggccagatctcctcagcaatcgtctcctctgngcagancnaaatnnnnnnnnnnnnnnnggccaaagtaagagcaatgctcgcagcttcaaaaaannnnnnnnnnnnnnnntcctgagacggcagccccggagcagcccccggngancannangnctgtgncnnnnnnnnnnncacagntnnngggntantgntnagagcagccacagtccagacntnnnnnnnnnnnnnnngagntntgccgacctacatgcagctntnnnnnnnnnnnnnnnnnnntcctgggtcagtcagtggcttttgtaaatttttggtgacattttctgtttcagatttttgaccagcagt

SEQ ID NO: 755 - DNA, 514 bp, Mus musculus; identical to SEQ ID NO: 754
  misc_feature (33)..(54): n is a, c, g, or t
  misc_feature (67)..(67): n is a, c, g, or t
  misc_feature (106)..(106): n is a, c, g, or t
  misc_feature (120)..(120): n is a, c, g, or t
  misc_feature (199)..(199): n is a, c, g, or t
  misc_feature (205)..(205): n is a, c, g, or t
  misc_feature (207)..(207): n is a, c, g, or t
  misc_feature (212)..(226): n is a, c, g, or t
  misc_feature (263)..(278): n is a, c, g, or t
  misc_feature (311)..(311): n is a, c, g, or t
  misc_feature (314)..(314): n is a, c, g, or t
  misc_feature (317)..(318): n is a, c, g, or t
  misc_feature (320)..(320): n is a, c, g, or t
  misc_feature (322)..(322): n is a, c, g, or t
  misc_feature (328)..(328): n is a, c, g, or t
  misc_feature (330)..(340): n is a, c, g, or t
  misc_feature (346)..(346): n is a, c, g, or t
  misc_feature (348)..(350): n is a, c, g, or t
  misc_feature (354)..(354): n is a, c, g, or t
  misc_feature (357)..(357): n is a, c, g, or t
  misc_feature (360)..(360): n is a, c, g, or t
  misc_feature (362)..(362): n is a, c, g, or t
  misc_feature (383)..(383): n is a, c, g, or t
  misc_feature (385)..(399): n is a, c, g, or t
  misc_feature (403)..(403): n is a, c, g, or t
  misc_feature (405)..(405): n is a, c, g, or t
  misc_feature (425)..(425): n is a, c, g, or t
  misc_feature (427)..(445): n is a, c, g, or t

SEQ ID NO: 756 - DNA, 580 bp, Mus musculus
  misc_feature (47)..(95): n is a, c, g, or t
  misc_feature (106)..(133): n is a, c, g, or t
  misc_feature (142)..(157): n is a, c, g, or t
  misc_feature (160)..(161): n is a, c, g, or t
  misc_feature (163)..(168): n is a, c, g, or t
  misc_feature (170)..(170): n is a, c, g, or t
  misc_feature (179)..(179): n is a, c, g, or t
  misc_feature (235)..(255): n is a, c, g, or t
  misc_feature (287)..(287): n is a, c, g, or t
  misc_feature (293)..(293): n is a, c, g, or t
  misc_feature (311)..(311): n is a, c, g, or t
  misc_feature (313)..(313): n is a, c, g, or t
  misc_feature (316)..(317): n is a, c, g, or t
  misc_feature (320)..(320): n is a, c, g, or t
  misc_feature (322)..(322): n is a, c, g, or t
  misc_feature (333)..(333): n is a, c, g, or t
  misc_feature (336)..(337): n is a, c, g, or t
  misc_feature (341)..(341): n is a, c, g, or t
  misc_feature (344)..(344): n is a, c, g, or t
  misc_feature (346)..(346): n is a, c, g, or t
  misc_feature (358)..(358): n is a, c, g, or t
  misc_feature (362)..(362): n is a, c, g, or t
  misc_feature (364)..(365): n is a, c, g, or t
  misc_feature (372)..(373): n is a, c, g, or t
  misc_feature (378)..(378): n is a, c, g, or t
  misc_feature (380)..(383): n is a, c, g, or t
  misc_feature (388)..(390): n is a, c, g, or t
  misc_feature (395)..(395): n is a, c, g, or t
  misc_feature (408)..(408): n is a, c, g, or t
  misc_feature (512)..(512): n is a, c, g, or t
  misc_feature (541)..(541): n is a, c, g, or t
  misc_feature (543)..(543): n is a, c, g, or t
  misc_feature (548)..(548): n is a, c, g, or t
tcccgagctcccgtcgtcgaggcgtgacgtcacagccgcgcgccccnnnnnnnnnnnnnnnnnnnnnnnnnnnnnnnnnnnnnnnnnnnnnnnnngcgggaagcannnnnnnnnnnnnnnnnnnnnnnnnnnngtcacctgnnnnnnnnnnnnnnnnggnngnnnnnnangccccgccnaggaagtgacggccttccacgaggagacgagcgtgacgttctcgccgctttcggannnnnnnnnnnnnnnnnnnnnggacagcggcgagggctgggacaaggccgggncctatnccatccaggcgcgcggtncnatnntgntncaggacgtggntgnngatntcntnaacgctgtgggnttcncnntcaaccnnttctncnnnnagctnnngcggntcccgcccacacngacaggaagtgaggaagtgacatcacagacgacagggattgacagcaaggacgtgaagtgaagtcatgggcaacaggaagtgcttccggaaacaggacgtgacntcatcaaacccccattgacaccgttgacntntgacntcccagactcggtgaccccggtcccacagttg

SEQ ID NO: 757 - DNA, 580 bp, Mus musculus; identical to SEQ ID NO: 756
  misc_feature (47)..(95): n is a, c, g, or t
  misc_feature (106)..(133): n is a, c, g, or t
  misc_feature (142)..(157): n is a, c, g, or t
  misc_feature (160)..(161): n is a, c, g, or t
  misc_feature (163)..(168): n is a, c, g, or t
  misc_feature (170)..(170): n is a, c, g, or t
  misc_feature (179)..(179): n is a, c, g, or t
  misc_feature (235)..(255): n is a, c, g, or t
  misc_feature (287)..(287): n is a, c, g, or t
  misc_feature (293)..(293): n is a, c, g, or t
  misc_feature (311)..(311): n is a, c, g, or t
  misc_feature (313)..(313): n is a, c, g, or t
  misc_feature (316)..(317): n is a, c, g, or t
  misc_feature (320)..(320): n is a, c, g, or t
  misc_feature (322)..(322): n is a, c, g, or t
  misc_feature (333)..(333): n is a, c, g, or t
  misc_feature (336)..(337): n is a, c, g, or t
  misc_feature (341)..(341): n is a, c, g, or t
  misc_feature (344)..(344): n is a, c, g, or t
  misc_feature (346)..(346): n is a, c, g, or t
  misc_feature (358)..(358): n is a, c, g, or t
  misc_feature (362)..(362): n is a, c, g, or t
  misc_feature (364)..(365): n is a, c, g, or t
  misc_feature (372)..(373): n is a, c, g, or t
  misc_feature (378)..(378): n is a, c, g, or t
  misc_feature (380)..(383): n is a, c, g, or t
  misc_feature (388)..(390): n is a, c, g, or t
  misc_feature (395)..(395): n is a, c, g, or t
  misc_feature (408)..(408): n is a, c, g, or t
  misc_feature (512)..(512): n is a, c, g, or t
  misc_feature (541)..(541): n is a, c, g, or t
  misc_feature (543)..(543): n is a, c, g, or t
  misc_feature (548)..(548): n is a, c, g, or t

SEQ ID NO: 758 - DNA, 122 bp, Mus musculus
tctgtaaaggtctccttgtggcacagaggactcaatcttgggaggatgcccacattctagacctccagtcctttgctcctacctccttctattgttggaatactgggcctcagtaagactaa

SEQ ID NO: 759 - DNA, 122 bp, Mus musculus; identical to SEQ ID NO: 758

SEQ ID NO: 760 - DNA, 222 bp, Mus musculus
  misc_feature (142)..(142): n is a, c, g, or t
  misc_feature (167)..(167): n is a, c, g, or t
  misc_feature (190)..(190): n is a, c, g, or t
  misc_feature (192)..(192): n is a, c, g, or t
aacatcagatgcagagaaagatttccacactatatgagaactccgccacagcgcctctgggactcagggctccacccactttcgaacattccgcatcttgggactccgcccattactccggccctcggcagctctcccaccntccgcagcgcgctcgctcccaccantcctttttaaggaagcttgttgntnttccgtaccaaacctttgtgtgtttttctg

SEQ ID NO: 761 - DNA, 222 bp, Mus musculus; identical to SEQ ID NO: 760
  misc_feature (142)..(142): n is a, c, g, or t
  misc_feature (167)..(167): n is a, c, g, or t
  misc_feature (190)..(190): n is a, c, g, or t
  misc_feature (192)..(192): n is a, c, g, or t

SEQ ID NO: 762 - DNA, 106 bp, Mus musculus
attctattgggcttcaaaaaggactaataatcaattgacttatagagatacctaagggttttttcttctcacttacactttaccccttgctgtagggaatgtgtgt

SEQ ID NO: 763 - DNA, 106 bp, Mus musculus; identical to SEQ ID NO: 762

SEQ ID NO: 764 - DNA, 316 bp, Mus musculus
  misc_feature (144)..(160): n is a, c, g, or t
  misc_feature (167)..(220): n is a, c, g, or t
  misc_feature (240)..(240): n is a, c, g, or t
  misc_feature (253)..(253): n is a, c, g, or t
tttcatgagttcagccgagccagagccaacatgaagacagccacagtcttgtttctggtggctttgatcactgtggggatgaacactacctatgtagtgtcttgccccaaagaatttgaaaaacctggagcttgtcccaagccnnnnnnnnnnnnnnnnngaatttnnnnnnnnnnnnnnnnnnnnnnnnnnnnnnnnnnnnnnnnnnnnnnnnnnnnnngcaatagctgtggtcatgtntgcaaaactcctntcttttaaatggttgacagccatgtggaagatggattcaatcttcataaacatgaatgatggc

SEQ ID NO: 765 - DNA, 316 bp, Mus musculus; identical to SEQ ID NO: 764
  misc_feature (144)..(160): n is a, c, g, or t
  misc_feature (167)..(220): n is a, c, g, or t
  misc_feature (240)..(240): n is a, c, g, or t
  misc_feature (253)..(253): n is a, c, g, or t

SEQ ID NO: 766 - DNA, 249 bp, Mus musculus
  misc_feature (129)..(129): n is a, c, g, or t
tctgtcagcacatactgaaagcccccattttcacagatttataactttaataatccagatgctgtccttggaggtatttaatatgcaataggtagcacctttactaattaatctgcatatgaagggttncctgatgtatttaataagatgtgtagaagctcttcaagcattaaactaaagttgacgttttatttcattgacttttcactgtcaaagaatatcaaccacttacaatggaattgaagtctg

SEQ ID NO: 767 - DNA, 249 bp, Mus musculus; identical to SEQ ID NO: 766
  misc_feature (129)..(129): n is a, c, g, or t

SEQ ID NO: 768 - DNA, 330 bp, Mus musculus
  misc_feature (54)..(54): n is a, c, g, or t
  misc_feature (58)..(59): n is a, c, g, or t
  misc_feature (61)..(61): n is a, c, g, or t
  misc_feature (70)..(70): n is a, c, g, or t
  misc_feature (75)..(75): n is a, c, g, or t
  misc_feature (82)..(82): n is a, c, g, or t
  misc_feature (90)..(91): n is a, c, g, or t
  misc_feature (94)..(94): n is a, c, g, or t
  misc_feature (97)..(97): n is a, c, g, or t
  misc_feature (107)..(108): n is a, c, g, or t
  misc_feature (115)..(115): n is a, c, g, or t
  misc_feature (120)..(121): n is a, c, g, or t
  misc_feature (123)..(123): n is a, c, g, or t
  misc_feature (126)..(126): n is a, c, g, or t
  misc_feature (130)..(130): n is a, c, g, or t
  misc_feature (137)..(153): n is a, c, g, or t
taacgggagcccagtaaatgggagttctcagctgggaaactcaaatccttcacngagnncnaatattccnaatcntcaaaantcattaannggnacntctgctagcnnaaagcanagctnngnacnagcnagctggnnnnnnnnnnnnnnnnngctgcttgttgcatgcacacaggaatggaaatcaactccttttccccttccccagcgccgtttgatctcttccaagatgcaccagcagcccgttcactactacacacagtccaaaaggcctttaaagtgacagtgtatataacttttgtactagtcagcctcctgacactataaatg

SEQ ID NO: 769 - DNA, 330 bp, Mus musculus; identical to SEQ ID NO: 768
  misc_feature (54)..(54): n is a, c, g, or t
  misc_feature (58)..(59): n is a, c, g, or t
  misc_feature (61)..(61): n is a, c, g, or t
  misc_feature (70)..(70): n is a, c, g, or t
  misc_feature (75)..(75): n is a, c, g, or t
  misc_feature (82)..(82): n is a, c, g, or t
  misc_feature (90)..(91): n is a, c, g, or t
  misc_feature (94)..(94): n is a, c, g, or t
  misc_feature (97)..(97): n is a, c, g, or t
  misc_feature (107)..(108): n is a, c, g, or t
  misc_feature (115)..(115): n is a, c, g, or t
  misc_feature (120)..(121): n is a, c, g, or t
  misc_feature (123)..(123): n is a, c, g, or t
  misc_feature (126)..(126): n is a, c, g, or t
  misc_feature (130)..(130): n is a, c, g, or t
  misc_feature (137)..(153): n is a, c, g, or t

SEQ ID NO: 770 - DNA, 358 bp, Mus musculus
  misc_feature (137)..(137): n is a, c, g, or t
  misc_feature (168)..(168): n is a, c, g, or t
  misc_feature (175)..(175): n is a, c, g, or t
  misc_feature (177)..(177): n is a, c, g, or t
  misc_feature (190)..(190): n is a, c, g, or t
  misc_feature (200)..(200): n is a, c, g, or t
  misc_feature (204)..(204): n is a, c, g, or t
  misc_feature (216)..(216): n is a, c, g, or t
  misc_feature (218)..(218): n is a, c, g, or t
  misc_feature (221)..(221): n is a, c, g, or t
  misc_feature (241)..(256): n is a, c, g, or t
  misc_feature (290)..(290): n is a, c, g, or t
  misc_feature (294)..(294): n is a, c, g, or t
aggggagatctttcatccaggcagaagtggtgaagaaaagccagggactggttttaaccagccaaaccaaccagcagcccctccctttctgttctggctgggggtgtgggggagaaactgaaactccaaaccagcanatacaggaaagaggaggaaacttttgagtcntaagtantngcaaaactctagnccaccaatanatgncaatgcagggantntgntcatccaaggctagaggagnnnnnnnnnnnnnnnnggaagagctttttggtggccatagctaagggctntcanttacatcaggtgggtaaagaccatgttaagggaagattccactcagcaagaaggcagccacaaa

SEQ ID NO: 771 - DNA, 358 bp, Mus musculus; identical to SEQ ID NO: 770
  misc_feature (137)..(137): n is a, c, g, or t
  misc_feature (168)..(168): n is a, c, g, or t
  misc_feature (175)..(175): n is a, c, g, or t
  misc_feature (177)..(177): n is a, c, g, or t
  misc_feature (190)..(190): n is a, c, g, or t
  misc_feature (200)..(200): n is a, c, g, or t
  misc_feature (204)..(204): n is a, c, g, or t
  misc_feature (216)..(216): n is a, c, g, or t
  misc_feature (218)..(218): n is a, c, g, or t
  misc_feature (221)..(221): n is a, c, g, or t
  misc_feature (241)..(256): n is a, c, g, or t
  misc_feature (290)..(290): n is a, c, g, or t
  misc_feature (294)..(294): n is a, c, g, or t

SEQ ID NO: 772 - DNA, 316 bp, Mus musculus
  misc_feature (70)..(85): n is a, c, g, or t
  misc_feature (291)..(291): n is a, c, g, or t
tcctattcctcaagcatgctagggaccttccacctgcaggacttctgtatttcctgtttttcctacctgnnnnnnnnnnnnnnnnaaatactttgatgacttaactaagtctttctattatgtttttcctagagaagtatttcctaactaacatatataaaacagccctgtccatctccatgttgtgtcatatcctattttatgttatgtcttctacaaagcactgatcactatttgataaatctttatttattgtggttagtgtttgtttctaccaaataagctgtaagntcctcaaagcagagatttctgtgtt

SEQ ID NO: 773 - DNA, 316 bp, Mus musculus; identical to SEQ ID NO: 772
  misc_feature (70)..(85): n is a, c, g, or t
  misc_feature (291)..(291): n is a, c, g, or t

SEQ ID NO: 774 - DNA, 427 bp, Mus musculus
  misc_feature (115)..(146): n is a, c, g, or t
  misc_feature (236)..(236): n is a, c, g, or t
  misc_feature (312)..(312): n is a, c, g, or t
  misc_feature (342)..(342): n is a, c, g, or t
ttgggactctccatcagcactcagcctggggtccccatgcttgtctggagaccagagacggctggtgtgtgaatttggtctctgcacagctcttttgggtccctcctgtaaagcnnnnnnnnnnnnnnnnnnnnnnnnnnnnnnnncagcttttactactatctccagtggctgcctagtgacccgggcagaggctgagttcacagggattttagttggataggcaggggtttggnccttcctagccccacctgtttgtttctcaggaggcagctgcagaaggctctgtggagctcaaagggagcttagatntcctttatgctagcagcactgagatttgtnatgcaggtctcagtggtgaggatccaggctgataggagtccccagcagaaagccaggatcctctctgcccactgtgctatggctg

SEQ ID NO: 775 - DNA, 427 bp, Mus musculus; identical to SEQ ID NO: 774
  misc_feature (115)..(146): n is a, c, g, or t
  misc_feature (236)..(236): n is a, c, g, or t
  misc_feature (312)..(312): n is a, c, g, or t
  misc_feature (342)..(342): n is a, c, g, or t

SEQ ID NO: 776 - DNA, 287 bp, Mus musculus
  misc_feature (114)..(114): n is a, c, g, or t
  misc_feature (118)..(191): n is a, c, g, or t
  misc_feature (244)..(244): n is a, c, g, or t
  misc_feature (246)..(246): n is a, c, g, or t
ctctcgaaagtggtttttaaggcaggagacaagtgcagctttggagcatgaagaaatgccttggttgcaaaggcagtacatggactcagcctatctgcctcaaacctcacgatnacannnnnnnnnnnnnnnnnnnnnnnnnnnnnnnnnnnnnnnnnnnnnnnnnnnnnnnnnnnnnnnnnnnnnnnnnncacgaccttctcaagaacgtgcgagatcttcgcaggagactcacagcccgggntnggaacagctgtcggcaccctcatcttttggtgacataaaag

SEQ ID NO: 777 - DNA, 287 bp, Mus musculus; identical to SEQ ID NO: 776
  misc_feature (114)..(114): n is a, c, g, or t
  misc_feature (118)..(191): n is a, c, g, or t
  misc_feature (244)..(244): n is a, c, g, or t
  misc_feature (246)..(246): n is a, c, g, or t

SEQ ID NO: 778 - DNA, 319 bp, Mus musculus
  misc_feature (185)..(185): n is a, c, g, or t
ccatgcgtgtctattaaggtttggttaggccatgtcaagttgcctgatgaagcttgcactctctcagctcaacttcaatggtctaaatcaggcaaaatggaaagaaatgtaagaatataaattcatctaaaaagaagcaattagatgcagtttcttagctttccaagcagtgccagtgccttggnagccaaagcacgaggatccctgcaacagcaagggaaggcctatgggctcctgtgagcactcttgtttgagcaggacacacaatagtttgctttttgcatacacatctcaaacatttgagatattcctcttagtg

SEQ ID NO: 779 - DNA, 319 bp, Mus musculus; identical to SEQ ID NO: 778
  misc_feature (185)..(185): n is a, c, g, or t

SEQ ID NO: 780 - DNA, 414 bp, Mus musculus
  misc_feature (115)..(115): n is a, c, g, or t
  misc_feature (120)..(120): n is a, c, g, or t
  misc_feature (141)..(141): n is a, c, g, or t
  misc_feature (227)..(227): n is a, c, g, or t
  misc_feature (314)..(314): n is a, c, g, or t
  misc_feature (374)..(374): n is a, c, g, or t
gttgttatcttgacttgtcttccacctctactttaaagccctcgtctagttaccttcaatagtgagaagtctaggatcataaatactgtcactgttcccactgacttacacacanttatnatgggcagaattaagctttantttaattgaatgtctttctagaaattcttaggaatcagtacattgttcatggttatttttggatattagtcagtagcttgccactngtaacagatttccccacctaaggttgaagattcctggtttgtgtagagtatttggttttgcacgaagtctagctttgcgattgtttntctttaatttgtttaaaaaaaaaaaagaaagccacaaatcctggtggtttgatgcttttntaagcattattgggcattgcgccggggaaagtctgtatac

SEQ ID NO: 781 - DNA, 414 bp, Mus musculus; identical to SEQ ID NO: 780
  misc_feature (115)..(115): n is a, c, g, or t
  misc_feature (120)..(120): n is a, c, g, or t
  misc_feature (141)..(141): n is a, c, g, or t
  misc_feature (227)..(227): n is a, c, g, or t
  misc_feature (314)..(314): n is a, c, g, or t
  misc_feature (374)..(374): n is a, c, g, or t

SEQ ID NO: 782 - DNA, 247 bp, Mus musculus
  misc_feature (197)..(197): n is a, c, g, or t
  misc_feature (211)..(211): n is a, c, g, or t
tgaactgatttctgtccatcgaatctacacgggaagcgtcgcatgtgagctcgacccgggaacgtggattgagcttagagcaggtgccgcgcttgcacttcacctaagtgtttaagaatcacggggcattaaaccttttgataacatatggtttttttagcacttgatacacagaagcaaagggatcaaattgtgtntcttaaaaaatganaagaaaaaaaagaattaaggcagttacctctgtaga

SEQ ID NO: 783 - DNA, 247 bp, Mus musculus; identical to SEQ ID NO: 782
  misc_feature (197)..(197): n is a, c, g, or t
  misc_feature (211)..(211): n is a, c, g, or t

SEQ ID NO: 784 - DNA, 452 bp, Mus musculus
  misc_feature (367)..(367): n is a, c, g, or t
  misc_feature (377)..(377): n is a, c, g, or t
  misc_feature (382)..(382): n is a, c, g, or t
cacacaaagcagtttagggtattaagtgtttattttactttacctcaaaatcccaggttgcagtctatcactgtggggaaatcaaaactgcaggaacttgtagccacaagtaagagcagagagccatcagtaaatgtttaagtactaagtttagtggatggttccacccacttctggttggctctcttcctgattggttaaggcaattcagtcactcacagacatgcttacaggctaaactgatctagacaagccttgttaagatttagaaaatcctaggtactgttgagatgaaaaagttaacatcttaagggctggagagaggctcagaagagctcaggttgcttttttggaagacccttgtttngttcccagancctanataacagctcaccaactgatgccttttctgaactccatgcacacagtacacacatatatactcaggcaag

SEQ ID NO: 785 - DNA, 452 bp, Mus musculus; identical to SEQ ID NO: 784
  misc_feature (367)..(367): n is a, c, g, or t
  misc_feature (377)..(377): n is a, c, g, or t
  misc_feature (382)..(382): n is a, c, g, or t

SEQ ID NO: 786 - DNA, 446 bp, Mus musculus
  misc_feature (26)..(26): n is a, c, g, or t
  misc_feature (78)..(78): n is a, c, g, or t
  misc_feature (197)..(197): n is a, c, g, or t
  misc_feature (214)..(214): n is a, c, g, or t
  misc_feature (222)..(223): n is a, c, g, or t
  misc_feature (227)..(227): n is a, c, g, or t
  misc_feature (243)..(243): n is a, c, g, or t
  misc_feature (258)..(258): n is a, c, g, or t
  misc_feature (262)..(262): n is a, c, g, or t
  misc_feature (276)..(276): n is a, c, g, or t
  misc_feature (300)..(300): n is a, c, g, or t
  misc_feature (373)..(373): n is a, c, g, or t
gtcatttacttatgaccacttctggncacctctccttccagaccaacaggatgagacagccactaccatgaagattangaggttcaacagagccaagccactgcctgatgtacttgaagaagagaaaatttatgcttaccccagcaatactgcctcagagactggcttcaggactgtttcaagcctagaagaaattnttgaaaagcaagagganataattgnntacntgaagcgacacaatgntctgctgagtaagcngttnttggagctggcaantcagccagccaggacttgagaggntcgtgggcatgagagccgctgagtccacagtgactgcagactgcccggctgccacaggaaaccccagcctttnccgacgtcgcgtccacagtgcatgctgggaacctgaatccagttctacctatgtagagctatgtatgtcccag

SEQ ID NO: 787 - DNA, 446 bp, Mus musculus; identical to SEQ ID NO: 786
  misc_feature (26)..(26): n is a, c, g, or t
  misc_feature (78)..(78): n is a, c, g, or t
  misc_feature (197)..(197): n is a, c, g, or t
  misc_feature (214)..(214): n is a, c, g, or t
  misc_feature (222)..(223): n is a, c, g, or t
  misc_feature (227)..(227): n is a, c, g, or t
  misc_feature (243)..(243): n is a, c, g, or t
  misc_feature (258)..(258): n is a, c, g, or t
  misc_feature (262)..(262): n is a, c, g, or t
  misc_feature (276)..(276): n is a, c, g, or t
  misc_feature (300)..(300): n is a, c, g, or t
  misc_feature (373)..(373): n is a, c, g, or t

SEQ ID NO: 788 - DNA, 197 bp, Mus musculus
  misc_feature (86)..(86): n is a, c, g, or t
  misc_feature (102)..(102): n is a, c, g, or t
  misc_feature (116)..(116): n is a, c, g, or t
  misc_feature (129)..(129): n is a, c, g, or t
  misc_feature (147)..(149): n is a, c, g, or t
  misc_feature (156)..(156): n is a, c, g, or t
  misc_feature (160)..(160): n is a, c, g, or t
  misc_feature (164)..(164): n is a, c, g, or t
attggagctcagcataatggtctgtaatctcaggactctggaggccaaggcagggagatcaaaagtttaagaccaatctgagtgcntagaaaaagctctggntcagagaagtaganacagagaaggaangaattttgtggttgcttnnngaatttnatanccangttacatagcactgactaacagtgtttacttaa

SEQ ID NO: 789 - DNA, 197 bp, Mus musculus; identical to SEQ ID NO: 788
  misc_feature (86)..(86): n is a, c, g, or t
  misc_feature (102)..(102): n is a, c, g, or t
  misc_feature (116)..(116): n is a, c, g, or t
  misc_feature (129)..(129): n is a, c, g, or t
  misc_feature (147)..(149): n is a, c, g, or t
  misc_feature (156)..(156): n is a, c, g, or t
  misc_feature (160)..(160): n is a, c, g, or t
  misc_feature (164)..(164): n is a, c, g, or t

SEQ ID NO: 790 - DNA, 367 bp, Mus musculus
  misc_feature (26)..(26): n is a, c, g, or t
  misc_feature (29)..(36): n is a, c, g, or t
  misc_feature (38)..(40): n is a, c, g, or t
  misc_feature (42)..(44): n is a, c, g, or t
  misc_feature (46)..(51): n is a, c, g, or t
  misc_feature (54)..(54): n is a, c, g, or t
  misc_feature (57)..(57): n is a, c, g, or t
  misc_feature (59)..(59): n is a, c, g, or t
  misc_feature (84)..(84): n is a, c, g, or t
  misc_feature (94)..(127): n is a, c, g, or t
  misc_feature (135)..(135): n is a, c, g, or t
  misc_feature (165)..(165): n is a, c, g, or t
  misc_feature (255)..(255): n is a, c, g, or t
aaggcttccataacaagcagtaaaanaannnnnnnnannngnnntnnnnnncgnaantngacttcgtatagcacatattacttnttatagcacnnnnnnnnnnnnnnnnnnnnnnnnnnnnnnnnnnggctgttntccttctgtgtgccattctgggagttgctntcaagtgttttcttaactaaaaaagtacttcacttcattttaaacttttggtaattttggtcactttggccgtgtaagaaatgtagcatntgaacattggccgtctcttctgtggatatgtttcctgggatgtagtaattctataaaattattacacagttgctagtcataggatattggcgtctagggaactgagtttctt

SEQ ID NO: 791 - DNA, 367 bp, Mus musculus; identical to SEQ ID NO: 790
  misc_feature (26)..(26): n is a, c, g, or t
  misc_feature (29)..(36): n is a, c, g, or t
  misc_feature (38)..(40): n is a, c, g, or t
  misc_feature (42)..(44): n is a, c, g, or t
  misc_feature (46)..(51): n is a, c, g, or t
  misc_feature (54)..(54): n is a, c, g, or t
  misc_feature (57)..(57): n is a, c, g, or t
  misc_feature (59)..(59): n is a, c, g, or t
  misc_feature (84)..(84): n is a, c, g, or t
  misc_feature (94)..(127): n is a, c, g, or t
  misc_feature (135)..(135): n is a, c, g, or t
  misc_feature (165)..(165): n is a, c, g, or t
  misc_feature (255)..(255): n is a, c, g, or t

SEQ ID NO: 792 - DNA, 575 bp, Mus musculus
  misc_feature (173)..(173): n is a, c, g, or t
  misc_feature (182)..(182): n is a, c, g, or t
  misc_feature (190)..(190): n is a, c, g, or t
  misc_feature (202)..(217): n is a, c, g, or t
  misc_feature (277)..(280): n is a, c, g, or t
  misc_feature (283)..(284): n is a, c, g, or t
  misc_feature (286)..(288): n is a, c, g, or t
  misc_feature (341)..(345): n is a, c, g, or t
  misc_feature (347)..(352): n is a, c, g, or t
  misc_feature (354)..(354): n is a, c, g, or t
  misc_feature (356)..(358): n is a, c, g, or t
  misc_feature (364)..(364): n is a, c, g, or t
  misc_feature (368)..(368): n is a, c, g, or t
  misc_feature (381)..(381): n is a, c, g, or t
  misc_feature (386)..(387): n is a, c, g, or t
  misc_feature (395)..(395): n is a, c, g, or t
  misc_feature (403)..(403): n is a, c, g, or t
  misc_feature (405)..(405): n is a, c, g, or t
  misc_feature (418)..(418): n is a, c, g, or t
  misc_feature (426)..(426): n is a, c, g, or t
  misc_feature (428)..(428): n is a, c, g, or t
  misc_feature (452)..(452): n is a, c, g, or t
  misc_feature (463)..(463): n is a, c, g, or t
  misc_feature (496)..(496): n is a, c, g, or t
  misc_feature (536)..(536): n is a, c, g, or t
ccggggaattctgagcggtaatagagggggtagactatggcagtgggcggggccaatccggtccgttcgaagggcgttggcggaaattaccgaagatgcccgaagccgtcgggacggacccgagtacctcacgcaagatggcggagctggaggaggtgactctggacgggaancctcttcangctctgcnggtgaccgaccnnnnnnnnnnnnnnnngcagcgaggcctagccaagagcgggcagaagagtgccctggtcaagcggctcaaaggggnnnnaanncnnnaaaatttacaaaaacactcaacaccccatgctgcattccagcttcataaagcnnnnncnnnnnnancnnnaggagntacntaggcagcgcctngaacnngaagctcnggaggctncngaacttgaagganagagctcntntttttctgaagaaaaaggagaatntgatgatgagnagccgaggaaaggggaaagacgatcatccaganttagacaggcaaaatctaaactccctgagtacagtcagantgctgaggaggaagaggatcaagagacaccatctagaaa

SEQ ID NO: 793 - DNA, 575 bp, Mus musculus; identical to SEQ ID NO: 792
  misc_feature (173)..(173): n is a, c, g, or t
  misc_feature (182)..(182): n is a, c, g, or t
  misc_feature (190)..(190): n is a, c, g, or t
  misc_feature (202)..(217): n is a, c, g, or t
  misc_feature (277)..(280): n is a, c, g, or t
  misc_feature (283)..(284): n is a, c, g, or t
  misc_feature (286)..(288): n is a, c, g, or t
  misc_feature (341)..(345): n is a, c, g, or t
  misc_feature (347)..(352): n is a, c, g, or t
  misc_feature (354)..(354): n is a, c, g, or t
  misc_feature (356)..(358): n is a, c, g, or t
  misc_feature (364)..(364): n is a, c, g, or t
  misc_feature (368)..(368): n is a, c, g, or t
  misc_feature (381)..(381): n is a, c, g, or t
  misc_feature (386)..(387): n is a, c, g, or t
  misc_feature (395)..(395): n is a, c, g, or t
  misc_feature (403)..(403): n is a, c, g, or t
  misc_feature (405)..(405): n is a, c, g, or t
  misc_feature (418)..(418): n is a, c, g, or t
  misc_feature (426)..(426): n is a, c, g, or t
  misc_feature (428)..(428): n is a, c, g, or t
  misc_feature (452)..(452): n is a, c, g, or t
  misc_feature (463)..(463): n is a, c, g, or t
  misc_feature (496)..(496): n is a, c, g, or t
  misc_feature (536)..(536): n is a, c, g, or t

SEQ ID NO: 794 - DNA, 236 bp, Mus musculus
  misc_feature (37)..(37): n is a, c, g, or t
  misc_feature (118)..(147): n is a, c, g, or t
caccactatgcgtgctataattctgaatgtaacattnttaattagaattcatagatgaaccatgtgtgagtgttggtttttttttttttaagaaatgcaagataaaggagtgtggctnnnnnnnnnnnnnnnnnnnnnnnnnnnnnntttgttcttttgtttgtttttcagctgactggagcttttacaccaggtacgccccattcattgtacggctgggtgcttggctgttttcc

SEQ ID NO: 795 - DNA, 236 bp, Mus musculus; identical to SEQ ID NO: 794
  misc_feature (37)..(37): n is a, c, g, or t
  misc_feature (118)..(147): n is a, c, g, or t

SEQ ID NO: 796 - DNA, 573 bp, Mus musculus
  misc_feature (26)..(41): n is a, c, g, or t
  misc_feature (172)..(175): n is a, c, g, or t
  misc_feature (179)..(179): n is a, c, g, or t
  misc_feature (182)..(183): n is a, c, g, or t
  misc_feature (188)..(188): n is a, c, g, or t
  misc_feature (194)..(194): n is a, c, g, or t
  misc_feature (196)..(196): n is a, c, g, or t
  misc_feature (203)..(203): n is a, c, g, or t
  misc_feature (205)..(205): n is a, c, g, or t
  misc_feature (207)..(208): n is a, c, g, or t
  misc_feature (219)..(219): n is a, c, g, or t
  misc_feature (223)..(223): n is a, c, g, or t
  misc_feature (239)..(239): n is a, c, g, or t
  misc_feature (247)..(247): n is a, c, g, or t
  misc_feature (278)..(278): n is a, c, g, or t
  misc_feature (302)..(302): n is a, c, g, or t
  misc_feature (308)..(308): n is a, c, g, or t
  misc_feature (311)..(311): n is a, c, g, or t
  misc_feature (333)..(333): n is a, c, g, or t
  misc_feature (385)..(385): n is a, c, g, or t
  misc_feature (398)..(398): n is a, c, g, or t
  misc_feature (473)..(489): n is a, c, g, or t
aagccggttgctagttcctggaggcnnnnnnnnnnnnnnnncttctgcaggtccccactttaggatcagacactatgctcaatcccgttatgactggtcactgaggcatacaacctatagcagtggttttcatttccacttttacatcatgcataagggcagagcgctcagnnnntccnagnnggccntggggncncaaatcntntnntcccccagccntccngcctcaccctgcttcntccaagantcagacaacgaggacttcctcagtgccattnagctgtgagactggaagtgtgatntccaantcntccctgcctttgtgcattaggntcctagggagttggaattcccagtttggggctggggattggttgctgggtantcaaatccagagntcttgtgcataaaacagtgccagtgggatcaagcccatgtgaaccaatacagtgtgagtccaactaaatcccagnnnnnnnnnnnnnnnnntttaggatttttatttttacagagtttccccacctcctccatgtgactttatttttaggggcaaagcttaacacatgctccttt

SEQ ID NO: 797 - DNA, 573 bp, Mus musculus; identical to SEQ ID NO: 796
  misc_feature (26)..(41): n is a, c, g, or t
  misc_feature (172)..(175): n is a, c, g, or t
  misc_feature (179)..(179): n is a, c, g, or t
  misc_feature (182)..(183): n is a, c, g, or t
  misc_feature (188)..(188): n is a, c, g, or t
  misc_feature (194)..(194): n is a, c, g, or t
  misc_feature (196)..(196): n is a, c, g, or t
  misc_feature (203)..(203): n is a, c, g, or t
  misc_feature (205)..(205): n is a, c, g, or t
  misc_feature (207)..(208): n is a, c, g, or t
  misc_feature (219)..(219): n is a, c, g, or t
  misc_feature (223)..(223): n is a, c, g, or t
  misc_feature (239)..(239): n is a, c, g, or t
  misc_feature (247)..(247): n is a, c, g, or t
  misc_feature (278)..(278): n is a, c, g, or t
  misc_feature (302)..(302): n is a, c, g, or t
  misc_feature (308)..(308): n is a, c, g, or t
  misc_feature (311)..(311): n is a, c, g, or t
  misc_feature (333)..(333): n is a, c, g, or t
  misc_feature (385)..(385): n is a, c, g, or t
  misc_feature (398)..(398): n is a, c, g, or t
  misc_feature (473)..(489): n is a, c, g, or t

SEQ ID NO: 798 - DNA, 264 bp, Mus musculus
  misc_feature (104)..(107): n is a, c, g, or t
  misc_feature (109)..(111): n is a, c, g, or t
  misc_feature (115)..(115): n is a, c, g, or t
  misc_feature (118)..(118): n is a, c, g, or t
  misc_feature (120)..(120): n is a, c, g, or t
  misc_feature (142)..(142): n is a, c, g, or t
  misc_feature (157)..(157): n is a, c, g, or t
  misc_feature (167)..(167): n is a, c, g, or t
  misc_feature (169)..(169): n is a, c, g, or t
gtcctttggtgcaaagaaattcacccttactgggcttgactccaagcccagaattgctctcaccaagcactggcctgaacagtagtgcagttcaaccctcaccnnnncnnntganttntntggaagggcattacattttttnaaaaagcttttggtnaacagtattntntaaaatagagtttttaaaatactgatatatgcatgttttgtgcatgagtagtagttctttggattcctgttttgatattcctgttgctgaattac

SEQ ID NO: 799 - DNA, 264 bp, Mus musculus; identical to SEQ ID NO: 798
  misc_feature (104)..(107): n is a, c, g, or t
  misc_feature (109)..(111): n is a, c, g, or t
  misc_feature (115)..(115): n is a, c, g, or t
  misc_feature (118)..(118): n is a, c, g, or t
  misc_feature (120)..(120): n is a, c, g, or t
  misc_feature (142)..(142): n is a, c, g, or t
  misc_feature (157)..(157): n is a, c, g, or t
  misc_feature (167)..(167): n is a, c, g, or t
  misc_feature (169)..(169): n is a, c, g, or t

SEQ ID NO: 800 - DNA, 459 bp, Mus musculus
  misc_feature (51)..(56): n is a, c, g, or t
  misc_feature (58)..(58): n is a, c, g, or t
  misc_feature (60)..(60): n is a, c, g, or t
  misc_feature (64)..(67): n is a, c, g, or t
  misc_feature (69)..(70): n is a, c, g, or t
  misc_feature (73)..(73): n is a, c, g, or t
  misc_feature (76)..(76): n is a, c, g, or t
  misc_feature (78)..(78): n is a, c, g, or t
  misc_feature (80)..(81): n is a, c, g, or t
  misc_feature (83)..(83): n is a, c, g, or t
  misc_feature (86)..(86): n is a, c, g, or t
  misc_feature (89)..(90): n is a, c, g, or t
  misc_feature (94)..(94): n is a, c, g, or t
  misc_feature (115)..(116): n is a, c, g, or t
  misc_feature (129)..(129): n is a, c, g, or t
  misc_feature (135)..(135): n is a, c, g, or t
  misc_feature (146)..(146): n is a, c, g, or t
  misc_feature (149)..(149): n is a, c, g, or t
  misc_feature (170)..(170): n is a, c, g, or t
  misc_feature (213)..(213): n is a, c, g, or t
  misc_feature (215)..(215): n is a, c, g, or t
  misc_feature (241)..(241): n is a, c, g, or t
  misc_feature (297)..(297): n is a, c, g, or t
gtgtttattgccaatgccctaattgccttgccccttcttagattcgatttnnnnnntntnttcnnnngnnccnagntntnncnggntgnngccngactgggggcccaggagaggnncggtgggagggangaagantctgttacctnatntcggtgcccgctggggagggntcccaggagaagaagaagggggtgcctggcgggtacttttctntnttttatttccagattttttttgtatntaaacttgcagatttgtattatacaaggacagccaataaaggaagaatataatggnggccactgggaaatcaaggtgtgtgcatacgagcggagggccctgcgtggagcttctcccaccgcatagctgtccctgcctgtgatcctggcactgggggcccggaagcagtgagatcctgagcttattgtgggtctctgaggccaccctggagtatgtgag

SEQ ID NO: 801 - DNA, 459 bp, Mus musculus; identical to SEQ ID NO: 800
  misc_feature (51)..(56): n is a, c, g, or t
  misc_feature (58)..(58): n is a, c, g, or t
  misc_feature (60)..(60): n is a, c, g, or t
  misc_feature (64)..(67): n is a, c, g, or t
  misc_feature (69)..(70): n is a, c, g, or t
  misc_feature (73)..(73): n is a, c, g, or t
  misc_feature (76)..(76): n is a, c, g, or t
  misc_feature (78)..(78): n is a, c, g, or t
  misc_feature (80)..(81): n is a, c, g, or t
  misc_feature (83)..(83): n is a, c, g, or t
  misc_feature (86)..(86): n is a, c, g, or t
  misc_feature (89)..(90): n is a, c, g, or t
  misc_feature (94)..(94): n is a, c, g, or t
  misc_feature (115)..(116): n is a, c, g, or t
  misc_feature (129)..(129): n is a, c, g, or t
  misc_feature (135)..(135): n is a, c, g, or t
  misc_feature (146)..(146): n is a, c, g, or t
  misc_feature (149)..(149): n is a, c, g, or t
  misc_feature (170)..(170): n is a, c, g, or t
  misc_feature (213)..(213): n is a, c, g, or t
  misc_feature (215)..(215): n is a, c, g, or t
  misc_feature (241)..(241): n is a, c, g, or t
  misc_feature (297)..(297): n is a, c, g, or t

SEQ ID NO: 802 - DNA, 189 bp, Mus musculus
cagagggcgatctccgttagctccaaggcggaaggatctgtcgtcccactgcagtgtcgggtttccgttgtcaaataggaagtgaagccacgggcgccatccttaagcaattcccgctatctcagactcctgaaccacagacgggatggtttataaagaatagaggttccagaggcagggatattcaag

SEQ ID NO: 803 - DNA, 189 bp, Mus musculus; identical to SEQ ID NO: 802

SEQ ID NO: 804 - DNA, 470 bp, Mus musculus
  misc_feature (55)..(69): n is a, c, g, or t
  misc_feature (71)..(72): n is a, c, g, or t
  misc_feature (74)..(76): n is a, c, g, or t
  misc_feature (97)..(97): n is a, c, g, or t
  misc_feature (133)..(133): n is a, c, g, or t
  misc_feature (356)..(356): n is a, c, g, or t
  misc_feature (358)..(358): n is a, c, g, or t
  misc_feature (361)..(361): n is a, c, g, or t
  misc_feature (364)..(364): n is a, c, g, or t
  misc_feature (366)..(366): n is a, c, g, or t
  misc_feature (373)..(373): n is a, c, g, or t
  misc_feature (387)..(387): n is a, c, g, or t
  misc_feature (395)..(395): n is a, c, g, or t
  misc_feature (400)..(400): n is a, c, g, or t
tcatcagagagctgattaagacctggagtgctgtgtgctgtccctccctcattgnnnnnnnnnnnnnnngnncnnngggagagcctgaggtagcagnctgctcagctgtatgaggtctggctccagaaggcanacaatgctcgctagtgttcccttctctcttaaggggtccaaggccccagtctggtgagcattctcctgtgctggccctagacacttggatgaggctgacccctactggatcaactgaggattaaggagtgggttctggatccccagcccaatctttctggtctcctggggtcactgagctggtagtgctgtgtgcccaggccatttggttcccactgtgaggntnatntgntntgagtantgggattgcaggtntgggcttntgggntccttcccaagctactaacatcctttatttggcaccaaagcacactttagcccctgaaaggggaaatgtg

SEQ ID NO: 805 - DNA, 470 bp, Mus musculus; identical to SEQ ID NO: 804
  misc_feature (55)..(69): n is a, c, g, or t
  misc_feature (71)..(72): n is a, c, g, or t
  misc_feature (74)..(76): n is a, c, g, or t
  misc_feature (97)..(97): n is a, c, g, or t
  misc_feature (133)..(133): n is a, c, g, or t
  misc_feature (356)..(356): n is a, c, g, or t
  misc_feature (358)..(358): n is a, c, g, or t
  misc_feature (361)..(361): n is a, c, g, or t
  misc_feature (364)..(364): n is a, c, g, or t
  misc_feature (366)..(366): n is a, c, g, or t
  misc_feature (373)..(373): n is a, c, g, or t
  misc_feature (387)..(387): n is a, c, g, or t
  misc_feature (395)..(395): n is a, c, g, or t
  misc_feature (400)..(400): n is a, c, g, or t

SEQ ID NO: 806 - DNA, 367 bp, Mus musculus
  misc_feature (32)..(32): n is a, c, g, or t
  misc_feature (34)..(35): n is a, c, g, or t
  misc_feature (70)..(70): n is a, c, g, or t
  misc_feature (72)..(72): n is a, c, g, or t
  misc_feature (227)..(227): n is a, c, g, or t
  misc_feature (229)..(229): n is a, c, g, or t
  misc_feature (231)..(231): n is a, c, g, or t
  misc_feature (236)..(236): n is a, c, g, or t
  misc_feature (325)..(325): n is a, c, g, or t
gcaaatcaaattgctacaagaacagatcgctntnntcgaaaagtgttctcaagagcaacttaatgaaaantnttcacaactagattctatagttgagaaactagagagacacaatgagagaaaggaaaaattaaagcaacagttgaaagcaaaggaattagaacttgaagaaatcagaaaagcttacagcacactaaataagaaatggcatgataaaggagaactantntntcatnttgaaatgcaagtaaaagaagtaaaagaaaaatttgaagacaaggaaaggaaactgaaagcagagagagacaaaagtcttgagctacanaaggatgcaatggaaaagcttcagaacatggatgatgccttt

SEQ ID NO: 807 - DNA, 367 bp, Mus musculus; identical to SEQ ID NO: 806
  misc_feature (32)..(32): n is a, c, g, or t
  misc_feature (34)..(35): n is a, c, g, or t
  misc_feature (70)..(70): n is a, c, g, or t
  misc_feature (72)..(72): n is a, c, g, or t
  misc_feature (227)..(227): n is a, c, g, or t
  misc_feature (229)..(229): n is a, c, g, or t
  misc_feature (231)..(231): n is a, c, g, or t
  misc_feature (236)..(236): n is a, c, g, or t
  misc_feature (325)..(325): n is a, c, g, or t

SEQ ID NO: 808 - DNA, 412 bp, Mus musculus
  misc_feature (252)..(252): n is a, c, g, or t
  misc_feature (257)..(257): n is a, c, g, or t
  misc_feature (262)..(262): n is a, c, g, or t
  misc_feature (266)..(266): n is a, c, g, or t
  misc_feature (268)..(268): n is a, c, g, or t
  misc_feature (274)..(274): n is a, c, g, or t
  misc_feature (376)..(376): n is a, c, g, or t
actccggcgtgcacacatgtacacacccacacacatctatctatacatgctggcttaagccaacctcttgtcttgcagatgtagaaattgttgctttgtttctctgataaaactggttttagacaaaaatagggatgatcactctcttagaccatgctaatgttaatagagaagaagcattcttttctttcttctatgtgaaacttgaaatgaggaaaagcaattctagtgtaaatcatgcaagcgctatanttacnataantaananaattcnagaagattcaatcactgtatagaatggtaacgtaccaactcatttcttatatcatattgttaaataaactgtgtgcaacagacaaaaagggtggtccttctngaattcatgtacatggtattaacacttagtgttcgg

SEQ ID NO: 809 - DNA, 412 bp, Mus musculus; identical to SEQ ID NO: 808
  misc_feature (252)..(252): n is a, c, g, or t
  misc_feature (257)..(257): n is a, c, g, or t
  misc_feature (262)..(262): n is a, c, g, or t
  misc_feature (266)..(266): n is a, c, g, or t
  misc_feature (268)..(268): n is a, c, g, or t
  misc_feature (274)..(274): n is a, c, g, or t
  misc_feature (376)..(376): n is a, c, g, or t

SEQ ID NO: 810 - DNA, 501 bp, Mus musculus
  misc_feature (38)..(38): n is a, c, g, or t
  misc_feature (43)..(43): n is a, c, g, or t
  misc_feature (62)..(62): n is a, c, g, or t
  misc_feature (64)..(64): n is a, c, g, or t
  misc_feature (86)..(87): n is a, c, g, or t
  misc_feature (99)..(99): n is a, c, g, or t
  misc_feature (104)..(104): n is a, c, g, or t
  misc_feature (106)..(106): n is a, c, g, or t
  misc_feature (109)..(109): n is a, c, g, or t
  misc_feature (161)..(161): n is a, c, g, or t
  misc_feature (167)..(167): n is a, c, g, or t
  misc_feature (182)..(189): n is a, c, g, or t
  misc_feature (193)..(197): n is a, c, g, or t
  misc_feature (199)..(205): n is a, c, g, or t
  misc_feature (207)..(208): n is a, c, g, or t
  misc_feature (210)..(211): n is a, c, g, or t
  misc_feature (216)..(216): n is a, c, g, or t
  misc_feature (220)..(220): n is a, c, g, or t
  misc_feature (229)..(229): n is a, c, g, or t
  misc_feature (234)..(234): n is a, c, g, or t
  misc_feature (236)..(236): n is a, c, g, or t
  misc_feature (244)..(244): n is a, c, g, or t
  misc_feature (256)..(256): n is a, c, g, or t
  misc_feature (265)..(265): n is a, c, g, or t
  misc_feature (275)..(275): n is a, c, g, or t
  misc_feature (419)..(419): n is a, c, g, or t
  misc_feature (431)..(432): n is a, c, g, or t
taacccagttcaagcccaggcctagccttaagttttanatctntagcgtcaagctcccaagngntggagtctgtaccaccacaccnnattcttataacntttgngntgnaaaatatcttcttttatttaaatattgttaaaatgtaaaaattagtttttancttacnggatttaccaaaacnnnnnnnngaannnnntnnnnnnntnngnntactngttngccaattcntgctntngagatacnagaagtcaaaanttgagattntcttactgtnttatacattagatccttgtctttagtcagagtcagctaactgtgattaaaagctaagtagaactgtttccttgtcccctaactgttttagtctagtgctacaatgtttaacccttcattaaatcacagagatatggaacactanaccctgtttttnntttctgtttaagccctcattttgtaatatagagtatagattggtaagttggccgccactctgagtcatc

SEQ ID NO: 811 - DNA, 501 bp, Mus musculus; identical to SEQ ID NO: 810
  misc_feature (38)..(38): n is a, c, g, or t
  misc_feature (43)..(43): n is a, c, g, or t
  misc_feature (62)..(62): n is a, c, g, or t
  misc_feature (64)..(64): n is a, c, g, or t
  misc_feature (86)..(87): n is a, c, g, or t
  misc_feature (99)..(99): n is a, c, g, or t
  misc_feature (104)..(104): n is a, c, g, or t
  misc_feature (106)..(106): n is a, c, g, or t
  misc_feature (109)..(109): n is a, c, g, or t
  misc_feature (161)..(161): n is a, c, g, or t
  misc_feature (167)..(167): n is a, c, g, or t
  misc_feature (182)..(189): n is a, c, g, or t
  misc_feature (193)..(197): n is a, c, g, or t
  misc_feature (199)..(205): n is a, c, g, or t
  misc_feature (207)..(208): n is a, c, g, or t
  misc_feature (210)..(211): n is a, c, g, or t
  misc_feature (216)..(216): n is a, c, g, or t
  misc_feature (220)..(220): n is a, c, g, or t
  misc_feature (229)..(229): n is a, c, g, or t
  misc_feature (234)..(234): n is a, c, g, or t
  misc_feature (236)..(236): n is a, c, g, or t
  misc_feature (244)..(244): n is a, c, g, or t
  misc_feature (256)..(256): n is a, c, g, or t
  misc_feature (265)..(265): n is a, c, g, or t
  misc_feature (275)..(275): n is a, c, g, or t
  misc_feature (419)..(419): n is a, c, g, or t
  misc_feature (431)..(432): n is a, c, g, or t

SEQ ID NO: 812 - DNA, 409 bp, Mus musculus
  misc_feature (238)..(238): n is a, c, g, or t
  misc_feature (240)..(240): n is a, c, g, or t
  misc_feature (253)..(253): n is a, c, g, or t
  misc_feature (255)..(255): n is a, c, g, or t
  misc_feature (282)..(282): n is a, c, g, or t
  misc_feature (284)..(284): n is a, c, g, or t
  misc_feature (296)..(296): n is a, c, g, or t
  misc_feature (350)..(350): n is a, c, g, or t
aaggtagctgttgaagccaacagcacagggcactaaggaagcaggttggtcacaacacctaggaaagtcacacgatggtcacaatccccagcctctggtcctgttcccaggcttgacttccaaaatgtcaggcttaaaatgttagtgaatgtaaaactatctcctcgaccaggtggggggcacaccacagtctcagctgctgaggagaggatgcgacgctacggggaaggaggaactntncctgcaccccatntnctggtgcccttgtgacctcactgtttntnttccatgcattntccacttccttgtccactgtgctggagtagatgccggcccttccttcgctcctntctttagtcacggaatgacacaggagattcaaggagaactcatgtgttaaaagacacgg

SEQ ID NO: 813 - DNA, 409 bp, Mus musculus; identical to SEQ ID NO: 812
  misc_feature (238)..(238): n is a, c, g, or t
  misc_feature (240)..(240): n is a, c, g, or t
  misc_feature (253)..(253): n is a, c, g, or t
  misc_feature (255)..(255): n is a, c, g, or t
  misc_feature (282)..(282): n is a, c, g, or t
  misc_feature (284)..(284): n is a, c, g, or t
  misc_feature (296)..(296): n is a, c, g, or t
  misc_feature (350)..(350): n is a, c, g, or t

SEQ ID NO: 814 - DNA, 493 bp, Mus musculus
  misc_feature (97)..(97): n is a, c, g, or t
  misc_feature (245)..(245): n is a, c, g, or t
  misc_feature (252)..(258): n is a, c, g, or t
  misc_feature (263)..(263): n is a, c, g, or t
  misc_feature (272)..(272): n is a, c, g, or t
  misc_feature (282)..(282): n is a, c, g, or t
  misc_feature (288)..(288): n is a, c, g, or t
  misc_feature (302)..(302): n is a, c, g, or t
  misc_feature (379)..(379): n is a, c, g, or t
  misc_feature (392)..(392): n is a, c, g, or t
  misc_feature (418)..(418): n is a, c, g, or t
  misc_feature (442)..(442): n is a, c, g, or t
gcagaaactcttcatctacccctggctcctgacgcttccgtaactatggggacctatctggaccggtctgaccatagtgagcactgccggggcatcnctggaagccccagtttgaacagtctccactctgcagacaaggcaaagtgctgtattgtagttcatttgaacctgaaatttagtataaaatagagtattttcatgtgttagaagtgtgtaaatatgctatctttaagaaattatattantctaatnnnnnnnttttnttagattgnatatccctgngacttnaaataagtagtttnaaaatgttgggggtggggaaagcggtgctagtcaggaagaagccagtaaatgtgtacatagtgcaacccaggaaggnttctttttccctncaggtctcacaaaggaaccagaatgntttgtcctgaagcagccatccctnctggagtcccatcctgtgtgtggtgaatgtatacagctttacatagtgtac

SEQ ID NO: 815 - DNA, 493 bp, Mus musculus; identical to SEQ ID NO: 814
  misc_feature (97)..(97): n is a, c, g, or t
  misc_feature (245)..(245): n is a, c, g, or t
  misc_feature (252)..(258): n is a, c, g, or t
  misc_feature (263)..(263): n is a, c, g, or t
  misc_feature (272)..(272): n is a, c, g, or t
  misc_feature (282)..(282): n is a, c, g, or t
  misc_feature (288)..(288): n is a, c, g, or t
  misc_feature (302)..(302): n is a, c, g, or t
  misc_feature (379)..(379): n is a, c, g, or t
  misc_feature (392)..(392): n is a, c, g, or t
  misc_feature (418)..(418): n is a, c, g, or t
  misc_feature (442)..(442): n is a, c, g, or t

SEQ ID NO: 816 - DNA, 110 bp, Mus musculus
ggaccaggaagcagcaactgttcctgatcaccagcctgaagctgagcctgctgggaacccacctgtgagcaggtgagccctgtgcctgccgggtcccaggagttgctgtc

SEQ ID NO: 817 - DNA, 110 bp, Mus musculus; identical to SEQ ID NO: 816

SEQ ID NO: 818 - DNA, 511 bp, Mus musculus
  misc_feature (124)..(124): n is a, c, g, or t
  misc_feature (137)..(137): n is a, c, g, or t
  misc_feature (175)..(175): n is a, c, g, or t
  misc_feature (178)..(178): n is a, c, g, or t
  misc_feature (234)..(234): n is a, c, g, or t
  misc_feature (273)..(273): n is a, c, g, or t
  misc_feature (278)..(278): n is a, c, g, or t
  misc_feature (282)..(282): n is a, c, g, or t
  misc_feature (284)..(284): n is a, c, g, or t
  misc_feature (297)..(297): n is a, c, g, or t
  misc_feature (344)..(344): n is a, c, g, or t
  misc_feature (363)..(363): n is a, c, g, or t
catctaaaggctgagatcaaagtgatagtggcaatccagatcatgtgtgctgtgacagtgttggctctgggaatcattttggcatctgttcctcctgtcccatattttaactcagtgttttctntcctgttaaaatntggctacccatttataggagctttgtttgtaagtaganttntggggggaataaaatgggggaagacagagaagggagttttcacccagctgcatttntgtatactgtgaaaaaggggtcaatggtagaccttgttntcctntctntnatcagagaatgtnttagtgtagaagggcagccattatgtcaccaggaagatttttcaatntagtttaaataaacacttnttatgaatttcaccctttcatgtcatcatttgagcaatgataactttaatgacctcttgagtttaggggaaagtctaggaaatgggattcaaatgatcaaaagcattttgtatcatgcaaagtcatcagtgggccacactgcagaaag

SEQ ID NO: 819 - DNA, 511 bp, Mus musculus; identical to SEQ ID NO: 818
  misc_feature (124)..(124): n is a, c, g, or t
  misc_feature (137)..(137): n is a, c, g, or t
  misc_feature (175)..(175): n is a, c, g, or t
  misc_feature (178)..(178): n is a, c, g, or t
  misc_feature (234)..(234): n is a, c, g, or t
  misc_feature (273)..(273): n is a, c, g, or t
  misc_feature (278)..(278): n is a, c, g, or t
  misc_feature (282)..(282): n is a, c, g, or t
  misc_feature (284)..(284): n is a, c, g, or t
  misc_feature (297)..(297): n is a, c, g, or t
  misc_feature (344)..(344): n is a, c, g, or t
  misc_feature (363)..(363): n is a, c, g, or t

SEQ ID NO: 820 - DNA, 503 bp, Mus musculus
  misc_feature (278)..(478): n is a, c, g, or t
gctgaattctcatccccattgcctgcctttttttcttttttttttaaaagacatggttttgtgtatccgagactcgcctcaaatttctatagaattaaggatgaccttgaacttcttagcctccagtctccacctcctggatgcagttatcatgggcagtatcacaacactgagtatgtagggctgggtatcaaacccagggtggtctcctgaatagtaggcaagtactttacccagcaagcctgatccacagccctagcctccagtttaaagactannnnnnnnnnnnnnnnnnnnnnnnnnnnnnnnnnnnnnnnnnnnnnnnnnnnnnnnnnnnnnnnnnnnnnnnnnnnnnnnnnnnnnnnnnnnnnnnnnnnnnnnnnnnnnnnnnnnnnnnnnnnnnnnnnnnnnnnnnnnnnnnnnnnnnnnnnnnnnnnnnnnnnnnnnnnnnnnnnnnnnnnnnnnnnnnnnnnnnnnntgcctctagccacaggttttatgtt

SEQ ID NO: 821 - DNA, 503 bp, Mus musculus; identical to SEQ ID NO: 820
  misc_feature (278)..(478): n is a, c, g, or t

SEQ ID NO: 822 - DNA, 204 bp, Mus musculus
  misc_feature (117)..(118): n is a, c, g, or t
  misc_feature (126)..(126): n is a, c, g, or t
atgtgagtgacctccgaccggtgccagacaaccaagaagttttctgccatcctgtgaccgaccagagtctgatcatagaacttctggagctgcaggcccacgtgcagggcgaacggnntgcgcggntaccattttgaggacgttggccgggtgcagggggctagggctgtgcacgtgctatctgtgcagcctctctgtttggag

SEQ ID NO: 823 - DNA, 204 bp, Mus musculus; identical to SEQ ID NO: 822
  misc_feature (117)..(118): n is a, c, g, or t
  misc_feature (126)..(126): n is a, c, g, or t

SEQ ID NO: 824 - DNA, 433 bp, Mus musculus
  misc_feature (26)..(40): n is a, c, g, or t
  misc_feature (278)..(293): n is a, c, g, or t
ctaccagatgctcacattgggaggannnnnnnnnnnnnnncttgtggacagtttagatcctttttctgaaggaatcatgttcagtgttcggccacctaagaaaagttggaagaagatctttaacctctcaggaggcgagaaaacccttagttccttggccttagtgtttgctcttcatcactacaagcccactcccctctacttcatggatgagattgatgcagctctggattttaaaaatgtgtctattgttgcattttatatatatgagcaaacannnnnnnnnnnnnnnntaataatctctcttcgaaataatatgtttgagatttcagacagacttattggcatctataaaacatataatagtacaaaaagtgttgcagtgaacccaaaacaaattgcgtctaaaggactctgttgaagttgttcacac

SEQ ID NO: 825 - DNA, 433 bp, Mus musculus; identical to SEQ ID NO: 824
  misc_feature (26)..(40): n is a, c, g, or t
  misc_feature (278)..(293): n is a, c, g, or t

SEQ ID NO: 826 - DNA, 382 bp, Mus musculus
  misc_feature (73)..(73): n is a, c, g, or t
  misc_feature (145)..(147): n is a, c, g, or t
tcaggagtgacatttcgttgagccggttttgtataaatgtattagagaagtggtctttggaaggaagcgaganctccgcagctgtttatcatttgcctctaacatgcaggagtcatcatgggagctgtcacttagacccggtagnnngcctcgctgactgttgactgtacagttgagtttggtaccgtggtacagcagggtgccatggcgcttgcactgttctctgcagcctcacagcagcctgaccagccagtagcttgccctgtacaagtgtccagtagtaaaattctaaatgtaagtagaaatttctctgctttttaaaatagtagactcagattacaggcatttttactaagtcattactgtgcagtaataaatgttc

SEQ ID NO: 827 - DNA, 382 bp, Mus musculus; identical to SEQ ID NO: 826
  misc_feature (73)..(73): n is a, c, g, or t
  misc_feature (145)..(147): n is a, c, g, or t

SEQ ID NO: 828 - DNA, 412 bp, Mus musculus
  misc_feature (37)..(37): n is a, c, g, or t
  misc_feature (348)..(348): n is a, c, g, or t
cagctatcaacttctgtctgttgtgtgggctttggcntctgactcagggcaggtttctgtctgagccctctctccaagctgcctcacctttgctcgcacctcagagggacctccatctctcctgaagcctcctccctctggcaagtactgggatacagccaccctttcaacccagcactctgaagaccaagacagccccctctggtgacactggccaagcttgatctttttcctaagaagtggtcttcagatccctgcaggtcgctcagaagacactgggctgcctagtgtgaattctgtcctactaacgtacagtgagcagctcctcacccccacccccgcaaaagntctcaccaagtcctggagtgtcaggcagggggctggaaatccaggaggacttcctgcaaaaggc

SEQ ID NO: 829 - DNA, 412 bp, Mus musculus; identical to SEQ ID NO: 828
  misc_feature (37)..(37): n is a, c, g, or t
  misc_feature (348)..(348): n is a, c, g, or t

SEQ ID NO: 830 - DNA, 358 bp, Mus musculus
  misc_feature (67)..(67): n is a, c, g, or t
  misc_feature (183)..(221): n is a, c, g, or t
agatgtcaagatccactgtgtttgagtttgtttgcagttccctcagcttgctggtaattgtggtgtnttgttttcgatgcaaatgtgatgtaatattcttattttctttggatcaaagctggactgaaaattgtactgtgtaattatttttgtgtttttaatgttatttggtactcgaattgnnnnnnnnnnnnnnnnnnnnnnnnnnnnnnnnnnnnnnnctcaggtgtcctatagatttttcttctaccaaagttcactctcagaatgaaattctacgtgctgtgtgactatgactcctaagacttccagggcttaagggctaactcctattagcaccttactatgtaagcaaatg

SEQ ID NO: 831 - DNA, 358 bp, Mus musculus; identical to SEQ ID NO: 830
  misc_feature (67)..(67): n is a, c, g, or t
  misc_feature (183)..(221): n is a, c, g, or t

SEQ ID NO: 832 - DNA, 179 bp, Mus musculus
  misc_feature (39)..(40): n is a, c, g, or t
ccttactatgtaagcaaatgctacaaaaaaaaaaaaaannctctgggttaaaaaaatttggcttaaatgtatcctttgttattttaaatatatcaagatattttaattaaaatttttacccctttgaaccaattttatagtatttgtacctattttggtgttttgtctttatagtaaat

SEQ ID NO: 833 - DNA, 179 bp, Mus musculus; identical to SEQ ID NO: 832
  misc_feature (39)..(40): n is a, c, g, or t

SEQ ID NO: 834 - DNA, 396 bp, Mus musculus
  misc_feature (26)..(26): n is a, c, g, or t
  misc_feature (41)..(41): n is a, c, g, or t
  misc_feature (44)..(44): n is a, c, g, or t
  misc_feature (46)..(46): n is a, c, g, or t
  misc_feature (108)..(108): n is a, c, g, or t
  misc_feature (111)..(111): n is a, c, g, or t
  misc_feature (183)..(204): n is a, c, g, or t
  misc_feature (251)..(265): n is a, c, g, or t
  misc_feature (271)..(271): n is a, c, g, or t
  misc_feature (306)..(306): n is a, c, g, or t
acgtcctgcgttgatctcggctctcnggaggacgcagaatncgntnctgaaggaaagtgggagggtacttctgctgagggatgtctgatggggacccgggtggaaccntcncgggaaggttgtaggcagaaccaccctggggccagagcttagagcgaggctggtgctgtcccctttgccccnnnnnnnnnnnnnnnnnnnnnncttgtcttcagcctggctttctaggcagagaggagaccaggcttctnnnnnnnnnnnnnnntcctcngtgggtgcaagaggccatgtgggtcatcagcccangcctcaccctggcagtgtgctctaactgaggcctcctctacccaactggaataaactggaagctgagcctcctgttgctgctgggtctag

SEQ ID NO: 835 - DNA, 396 bp, Mus musculus; identical to SEQ ID NO: 834
  misc_feature (26)..(26): n is a, c, g, or t
  misc_feature (41)..(41): n is a, c, g, or t
  misc_feature (44)..(44): n is a, c, g, or t
  misc_feature (46)..(46): n is a, c, g, or t
  misc_feature (108)..(108): n is a, c, g, or t
  misc_feature (111)..(111): n is a, c, g, or t
  misc_feature (183)..(204): n is a, c, g, or t
  misc_feature (251)..(265): n is a, c, g, or t
  misc_feature (271)..(271): n is a, c, g, or t
  misc_feature (306)..(306): n is a, c, g, or t

SEQ ID NO: 836 - DNA, 263 bp, Mus musculus
  misc_feature (130)..(130): n is a, c, g, or t
gagacacaggctcctcaaatgctcctagcttcatagctgcccattcctgacacacagcctgtcagaacttcagccgtgtgttgagaacctggaccaattggaggatgggctgcacctgtggggctggccngaccctgctagtcctccccagagaccacccctctgtggagtcccctggccttcagagcaaagcacagttggcccctcagtccctgctgcgcaggaggggtgtgctccgggctcaggtggtctcctgcccaagt

SEQ ID NO: 837 - DNA, 263 bp, Mus musculus; identical to SEQ ID NO: 836
  misc_feature (130)..(130): n is a, c, g, or t

SEQ ID NO: 838 - DNA, 48 bp, Mus musculus
agatgaaactccttctgctggctgctctgctcacagcaggcgctgctg

SEQ ID NO: 839 - DNA, 48 bp, Mus musculus; identical to SEQ ID NO: 838

SEQ ID NO: 840 - DNA, 299 bp, Mus musculus
  misc_feature (41)..(89): n is a, c, g, or t
  misc_feature (109)..(148): n is a, c, g, or t
  misc_feature (157)..(157): n is a, c, g, or t
  misc_feature (159)..(160): n is a, c, g, or t
  misc_feature (162)..(163): n is a, c, g, or t
  misc_feature (165)..(165): n is a, c, g, or t
  misc_feature (167)..(173): n is a, c, g, or t
  misc_feature (189)..(189): n is a, c, g, or t
  misc_feature (191)..(191): n is a, c, g, or t
  misc_feature (196)..(196): n is a, c, g, or t
  misc_feature (217)..(217): n is a, c, g, or t
  misc_feature (223)..(223): n is a, c, g, or t
  misc_feature (231)..(231): n is a, c, g, or t
  misc_feature (239)..(239): n is a, c, g, or t
  misc_feature (243)..(243): n is a, c, g, or t
  misc_feature (248)..(248): n is a, c, g, or t
  misc_feature (251)..(251): n is a, c, g, or t
  misc_feature (270)..(270): n is a, c, g, or t
  misc_feature (273)..(273): n is a, c, g, or t
agcaggagggtgccgccgagctcatccacctaaaccacagnnnnnnnnnnnnnnnnnnnnnnnnnnnnnnnnnnnnnnnnnnnnnnnnngtatttgatattggatgcgnnnnnnnnnnnnnnnnnnnnnnnnnnnnnnnnnnnnnnnnagaagaggngnngnngnannnnnnnttagtgaacatcgttncnaaatngaaagctctcaacatcacagnaattgnccctgtgnactccaancctntccgnggnagcagcctccccctgaggnccnaggccaggaggaaccgcagggactta

SEQ ID NO: 841 - DNA, 299 bp, Mus musculus; identical to SEQ ID NO: 840
  misc_feature (41)..(89): n is a, c, g, or t
  misc_feature (109)..(148): n is a, c, g, or t
  misc_feature (157)..(157): n is a, c, g, or t
  misc_feature (159)..(160): n is a, c, g, or t
  misc_feature (162)..(163): n is a, c, g, or t
  misc_feature (165)..(165): n is a, c, g, or t
  misc_feature (167)..(173): n is a, c, g, or t
  misc_feature (189)..(189): n is a, c, g, or t
  misc_feature (191)..(191): n is a, c, g, or t
  misc_feature (196)..(196): n is a, c, g, or t
  misc_feature (217)..(217): n is a, c, g, or t
  misc_feature (223)..(223): n is a, c, g, or t
  misc_feature (231)..(231): n is a, c, g, or t
  misc_feature (239)..(239): n is a, c, g, or t
  misc_feature (243)..(243): n is a, c, g, or t
  misc_feature (248)..(248): n is a, c, g, or t
  misc_feature (251)..(251): n is a, c, g, or t
  misc_feature (270)..(270): n is a, c, g, or t
  misc_feature (273)..(273): n is a, c, g, or t

SEQ ID NO: 842 - DNA, 497 bp, Mus musculus
  misc_feature (51)..(77): n is a, c, g, or t
  misc_feature (222)..(222): n is a, c, g, or t
  misc_feature (230)..(230): n is a, c, g, or t
  misc_feature (258)..(258): n is a, c, g, or t
  misc_feature (260)..(260): n is a, c, g, or t
  misc_feature (291)..(292): n is a, c, g, or t
  misc_feature (295)..(295): n is a, c, g, or t
  misc_feature (349)..(349): n is a, c, g, or t
  misc_feature (365)..(365): n is a, c, g, or t
  misc_feature (367)..(367): n is a, c, g, or t
  misc_feature (426)..(448): n is a, c, g, or t
agagtgaggctaagcgcttggccatcatgatgatgaaaaagcgagagaagnnnnnnnnnnnnnnnnnnnnnnnnnnnaagcggcgcaaaatccgagaggccaacaagctggcagagaagaggaaagcccatgatgatgctgtgaggtctgagaaaaaggccaagaggacaaggcccgtgtgagctccagttgtccctcactgagatttggacttggcagaancaagctantgaaacacacatacacaccagccagcantntcatactttggtggtatgtggctagccccannccncctttgtggttcatgccagtgcctgggcaaagagacctcaacccaacgcagttnttaatccaggagtccntntgacatcctcattttccttggctttctacagcctcctacatagctgtgcccatcctgtnnnnnnnnnnnnnnnnnnnnnnnagggtggtgagcttttattattaaatggttggatctttacagccaaaaa

SEQ ID NO: 843 - DNA, 497 bp, Mus musculus; identical to SEQ ID NO: 842
  misc_feature (51)..(77): n is a, c, g, or t
  misc_feature (222)..(222): n is a, c, g, or t
  misc_feature (230)..(230): n is a, c, g, or t
  misc_feature (258)..(258): n is a, c, g, or t
  misc_feature (260)..(260): n is a, c, g, or t
  misc_feature (291)..(292): n is a, c, g, or t
  misc_feature (295)..(295): n is a, c, g, or t
  misc_feature (349)..(349): n is a, c, g, or t
  misc_feature (365)..(365): n is a, c, g, or t
  misc_feature (367)..(367): n is a, c, g, or t
  misc_feature (426)..(448): n is a, c, g, or t

SEQ ID NO: 844 - DNA, 164 bp, Mus musculus
  misc_feature (63)..(88): n is a, c, g, or t
  misc_feature (106)..(106): n is a, c, g, or t
caggtggcaccagaggctaccgtgcgtcgcttccttcagggtcgccactgtgagcaaagctcnnnnnnnnnnnnnnnnnnnnnnnnnngggccccatgtgacaggntcatgaggcagtgcaagggtgacctcatccagcccaacctggccaaggtgtgcgagct

SEQ ID NO: 845 - DNA, 164 bp, Mus musculus; identical to SEQ ID NO: 844
  misc_feature (63)..(88): n is a, c, g, or t
  misc_feature (106)..(106): n is a, c, g, or t

SEQ ID NO: 846 - DNA, 75 bp, Mus musculus
ctttcgggaacctaggactgccagaaactttctgcctctacgttatgcatgcatttagacgcttacccgaatttt

SEQ ID NO: 847 - DNA, 75 bp, Mus musculus; identical to SEQ ID NO: 846

SEQ ID NO: 848 - DNA, 75 bp, Mus musculus; identical to SEQ ID NO: 846

SEQ ID NO: 849 - DNA, 51 bp, Mus musculus
gcgcctggacatatccagcccccaacccgcaatccactctatccgggagac

SEQ ID NO: 850 - DNA, 51 bp, Mus musculus; identical to SEQ ID NO: 849

SEQ ID NO: 851 - DNA, 51 bp, Mus musculus; identical to SEQ ID NO: 849

SEQ ID NO: 852 - DNA, 88 bp, Mus musculus
agaatggtttctcagtacctgctgaacttgagtgccacgcgctgtgccagggagagtttcttttgctgctcccctgaatttgcatcca

SEQ ID NO: 853 - DNA, 88 bp, Mus musculus; identical to SEQ ID NO: 852

SEQ ID NO: 854 - DNA, 88 bp, Mus musculus; identical to SEQ ID NO: 852

SEQ ID NO: 855 - DNA, 39 bp, Mus musculus
gatctgacttgtcccataattgtggggtattgtaatcca

SEQ ID NO: 856 - DNA, 39 bp, Mus musculus; identical to SEQ ID NO: 855

SEQ ID NO: 857 - DNA, 39 bp, Mus musculus; identical to SEQ ID NO: 855

SEQ ID NO: 858 - DNA, 70 bp, Mus musculus
tccgccacttatccccgaaattatctttccttgacccctccccaaaatgcttgccccgttattttcgtgc

SEQ ID NO: 859 - DNA, 70 bp, Mus musculus; identical to SEQ ID NO: 858

SEQ ID NO: 860 - DNA, 70 bp, Mus musculus; identical to SEQ ID NO: 858

SEQ ID NO: 861 - DNA, 158 bp, Mus musculus
aatagaacaaggtcccattaatgggcctgcctttcctttacccaatgctagaaggaaccatatcaggttttcccaggctttcatccattttggcctcatttcagattcctgcttaggatgggggtgtggctaggggtgcgcctttcctcgtctcctgt

SEQ ID NO: 862 - DNA, 158 bp, Mus musculus; identical to SEQ ID NO: 861

SEQ ID NO: 863 - DNA, 158 bp, Mus musculus; identical to SEQ ID NO: 861

SEQ ID NO: 864 - DNA, 50 bp, Mus musculus
tggaaacattactgacctttcaaagagttgcccagctttcctgcactttt

SEQ ID NO: 865 - DNA, 50 bp, Mus musculus; identical to SEQ ID NO: 864

SEQ ID NO: 866 - DNA, 50 bp, Mus musculus; identical to SEQ ID NO: 864

SEQ ID NO: 867 - DNA, 86 bp, Mus musculus
ccacatcctccaatcatagtcagagggtccctcccaggggatgggactttccgtgcatgccccacctatttcctctccatgcaagt

SEQ ID NO: 868 - DNA, 86 bp, Mus musculus; identical to SEQ ID NO: 867

SEQ ID NO: 869 - DNA, 86 bp, Mus musculus; identical to SEQ ID NO: 867

SEQ ID NO: 870 - DNA, 36 bp, Mus musculus
ccatatcaccccattgtgttccaccagcttctcatc

SEQ ID NO: 871 - DNA, 36 bp, Mus musculus; identical to SEQ ID NO: 870

SEQ ID NO: 872 - DNA, 36 bp, Mus musculus; identical to SEQ ID NO: 870

SEQ ID NO: 873 - DNA, 85 bp, Mus musculus
gaagccctggggaaagactgacaaaccccagaaccacagggttacattcaggcagccacactagaccacaatttttggccctgtt

SEQ ID NO: 874 - DNA, 85 bp, Mus musculus; identical to SEQ ID NO: 873

SEQ ID NO: 875 - DNA, 85 bp, Mus musculus; identical to SEQ ID NO: 873

SEQ ID NO: 876 - DNA, 202 bp, Mus musculus
ctcagcggtcataccgttacacagactgtcgccctctccggtgtttttctaaagggtttccagtcgggttgcacccagctttggtacctagaagatccttttccagacaccggggaccttcgctttttgtaatctgttttctgataacgagtttcgggttggcgttcctttgtatcaattgcttttgattttaacccattgg

SEQ ID NO: 877 - DNA, 202 bp, Mus musculus; identical to SEQ ID NO: 876

SEQ ID NO: 878 - DNA, 202 bp, Mus musculus; identical to SEQ ID NO: 876

SEQ ID NO: 879 - DNA, 110 bp, Mus musculus
gtggaccttattcgcctccatttacccatcctcaggttcagattttatagagagcccttccccgcctgctgcctggagcataaatgtttttcccacagccgactgtccaa

SEQ ID NO: 880 - DNA, 110 bp, Mus musculus; identical to SEQ ID NO: 879

SEQ ID NO: 881 - DNA, 110 bp, Mus musculus; identical to SEQ ID NO: 879

SEQ ID NO: 882 - DNA, 138 bp, Mus musculus
  misc_feature (74)..(74): n is a, c, g, or t
gccggcccataataccatccccccacccccaaaaagcccctaacaatcattgagttcttgatttctgggggggnatgaaccggtttggagaattgaatccttccgtttgtcccctgaccaccataagtgcccacataa

SEQ ID NO: 883 - DNA, 138 bp, Mus musculus; identical to SEQ ID NO: 882
  misc_feature (74)..(74): n is a, c, g, or t

SEQ ID NO: 884 - DNA, 138 bp, Mus musculus; identical to SEQ ID NO: 882
  misc_feature (74)..(74): n is a, c, g, or t

SEQ ID NO: 885 - DNA, 144 bp, Mus musculus
ccaccctgcggaacagtgaaatgtgtataattaagaggagggcgacgacccttgccgcgggacccgggactcgagcccgggacttcgcagctacagcaaatctatttttaatattgtgctgagcaagacagatcgcttgcatat

SEQ ID NO: 886 - DNA, 144 bp, Mus musculus; identical to SEQ ID NO: 885

SEQ ID NO: 887 - DNA, 144 bp, Mus musculus; identical to SEQ ID NO: 885

SEQ ID NO: 888 - DNA, 35 bp, Mus musculus
gaacctgctcgcaccttataccccgtatccttact

SEQ ID NO: 889 - DNA, 35 bp, Mus musculus; identical to SEQ ID NO: 888

SEQ ID NO: 890 - DNA, 35 bp, Mus musculus; identical to SEQ ID NO: 888

SEQ ID NO: 891 - DNA, 172 bp, Mus musculus
tcacaagaatctagagcccaggccgggatggtcccccaacacaccgagcgccctttagatccttcctacccacaggcttgcccggattgcaggtcttccggttcatcctgtgcccaggcctcattctgagcccgtgccagggcaggaaagagctggctcctttggatctttt

SEQ ID NO: 892 - DNA, 172 bp, Mus musculus; identical to SEQ ID NO: 891

SEQ ID NO: 893 - DNA, 172 bp, Mus musculus; identical to SEQ ID NO: 891

SEQ ID NO: 894 - DNA, 60 bp, Mus musculus
gagaaggcaagcatcccaaccagatccaaggggacactgtccccatgctgaatgctcagg

SEQ ID NO: 895 - DNA, 60 bp, Mus musculus; identical to SEQ ID NO: 894

SEQ ID NO: 896 - DNA, 60 bp, Mus musculus; identical to SEQ ID NO: 894

SEQ ID NO: 897 - DNA, 104 bp, Mus musculus
agcccaaatcacctccgactgatgagcttggacaagacttagcacccgacactctcacaattggttcttgagctctccctgttgttctcataagctttcttccg

SEQ ID NO: 898 - DNA, 104 bp, Mus musculus; identical to SEQ ID NO: 897

SEQ ID NO: 899 - DNA, 104 bp, Mus musculus; identical to SEQ ID NO: 897

SEQ ID NO: 900 - DNA, 61 bp, Mus musculus
aaggatgtagccactctcctgtggccctctgacttggaagaactcggaatctgagagcccc

SEQ ID NO: 901 - DNA, 61 bp, Mus musculus; identical to SEQ ID NO: 900

SEQ ID NO: 902 - DNA, 61 bp, Mus musculus; identical to SEQ ID NO: 900

SEQ ID NO: 903 - DNA, 164 bp, Mus musculus
ttttctcgaatgaggcattccccaaacactaaggtggagataatgccccagagccgagagagtcccatcttcaagcaatttttcaagaactggaagtgagggtgggtttcccccttttctgctctcctgcatcccacccctgcctgctggttcagcactgaggt

SEQ ID NO: 904 - DNA, 164 bp, Mus musculus; identical to SEQ ID NO: 903

SEQ ID NO: 905 - DNA, 164 bp, Mus musculus; identical to SEQ ID NO: 903

SEQ ID NO: 906 - DNA, 95 bp, Mus musculus
accatttgcaatattttggcttcagtaccccggactgtcaaacatagcccacccaacagaaggtactttgctgctggttccttcactgccttttt

SEQ ID NO: 907 - DNA, 95 bp, Mus musculus; identical to SEQ ID NO: 906

SEQ ID NO: 908 - DNA, 95 bp, Mus musculus; identical to SEQ ID NO: 906

SEQ ID NO: 909 - DNA, 140 bp, Mus musculus
ccgtcaaattaacacccaagtatatcctcaagaatacctcataatgaattgccttccttttgaaacgtggtaatcaatgcttgggtggaatctctccctggaaagacaacctcctacattacctggattcgtccttttct

SEQ ID NO: 910 - DNA, 140 bp, Mus musculus; identical to SEQ ID NO: 909

SEQ ID NO: 911 - DNA, 140 bp, Mus musculus; identical to SEQ ID NO: 909

SEQ ID NO: 912 - DNA, 116 bp, Mus musculus
tgatcaggtcacattccggtgccttccaccccctatggcacgggcgccccgccttgccataccacagctccctccaggcttagacctggcttcaccgcatttcaggtgctataccc

SEQ ID NO: 913 - DNA, 116 bp, Mus musculus; identical to SEQ ID NO: 912

SEQ ID NO: 914 - DNA, 116 bp, Mus musculus; identical to SEQ ID NO: 912

SEQ ID NO: 915 - DNA, 74 bp, Mus musculus
ttaatttcaaacttgacctttccagttaatcctgccatctgcctccaccacagaattttttcacactttagcag

SEQ ID NO: 916 - DNA, 74 bp, Mus musculus; identical to SEQ ID NO: 915

SEQ ID NO: 917 - DNA, 74 bp, Mus musculus; identical to SEQ ID NO: 915

SEQ ID NO: 918 - DNA, 106 bp, Mus musculus
aggggcgttcccaggccctcatggagattataatttcagcaaaaccccattctgcaatttttgtttcttgggaaggaaatcacctgcactgaaaatgaggcaattt

SEQ ID NO: 919 - DNA, 106 bp, Mus musculus; identical to SEQ ID NO: 918

SEQ ID NO: 920 - DNA, 106 bp, Mus musculus; identical to SEQ ID NO: 918

SEQ ID NO: 921 - DNA, 133 bp, Mus musculus
gagtacattctctcccccttccttagaacagaagccactctactacctcatgatattggacctccggatctgggccctgtggtctgtgccaggcgtggaaggagggtggcttcctgtttacccctgccgtgct

SEQ ID NO: 922 - DNA, 133 bp, Mus musculus; identical to SEQ ID NO: 921

SEQ ID NO: 923 - DNA, 133 bp, Mus musculus; identical to SEQ ID NO: 921

SEQ ID NO: 924 - DNA, 133 bp, Mus musculus
  misc_feature (29)..(43): n is a, c, g, or t
ctgactttccttggtatctgcccctcatnnnnnnnnnnnnnnncccacagtctcgacatccgactgcccgctcttcagcttgcgttcctcaccttcaacacaagtcccgtgtgctcttcatgatacacctctc

SEQ ID NO: 925 - DNA, 133 bp, Mus musculus; identical to SEQ ID NO: 924
  misc_feature (29)..(43): n is a, c, g, or t

SEQ ID NO: 926 - DNA, 133 bp, Mus musculus; identical to SEQ ID NO: 924
  misc_feature (29)..(43): n is a, c, g, or t

SEQ ID NO: 927 - DNA, 175 bp, Mus musculus
aacttaaacaaatggcggtacatatacttaatctgagtaaccatctcctctctggccaatctctatgcttttagaagtttacaaaactgcttttgtttttttctataaccatttctatcatcccaataagctgtttggacaagagcgagaacagtgctaacagtctgcgctcgat

SEQ ID NO: 928 - DNA, 175 bp, Mus musculus; identical to SEQ ID NO: 927

SEQ ID NO: 929 - DNA, 175 bp, Mus musculus; identical to SEQ ID NO: 927

SEQ ID NO: 930 - DNA, 399 bp, Mus musculus
  misc_feature (120)..(120): n is a, c, g, or t
  misc_feature (141)..(141): n is a, c, g, or t
  misc_feature (258)..(258): n is a, c, g, or t
  misc_feature (359)..(360): n is a, c, g, or t
atgagcctcgcttgccttcactgcttctgttttaaacagtagtaaaaaactggcgttcaaggcagagtccacaggtgcttaaaggacactttcagaagaagctgaaggccttgaggtctncccacccagctgatctcggantcctggccccagtccatgtgtagctctaagaacatgaagtagctggttgcaagatggaccaactcaccaagtgtcagcccaggtagtgagaaacttgcagtagacatggagctgggnctcttttaaatttgttttgtgaagtttcagcctcttaatgcttttgtataggaatactcactgtgtggtttaatcatgatttattaaaaaaaaaaaaaaanngaacaaatgaacgaaaattggcaatctttgctgatcttc

SEQ ID NO: 931 - DNA, 399 bp, Mus musculus; identical to SEQ ID NO: 930
  misc_feature (120)..(120): n is a, c, g, or t
  misc_feature (141)..(141): n is a, c, g, or t
  misc_feature (258)..(258): n is a, c, g, or t
  misc_feature (359)..(360): n is a, c, g, or t

SEQ ID NO: 932 - DNA, 234 bp, Mus musculus
  misc_feature (69)..(69): n is a, c, g, or t
gcgggcttggaacctctctctgccccggctgcagattttattagagctgctgccgcgtctcctgggctngagcccacccccagaggatccccgaactgcctcaccagcgaggcgtgcctcgtctgtgggcattctgctcagagcggaggagctcatcttgaaaaagccgcggagcgaactcgtgtttgagggtcagaggcatcggcacggaacttggaccggaactgtccgact

SEQ ID NO: 933 - DNA, 234 bp, Mus musculus; identical to SEQ ID NO: 932
  misc_feature (69)..(69): n is a, c, g, or t

SEQ ID NO: 934 - DNA, 266 bp, Mus musculus
  misc_feature (189)..(205): n is a, c, g, or t
  misc_feature (236)..(237): n is a, c, g, or t
tccttttgattctgagggtcctacagagccaaccagttcttttaccatttaaatataaaactgctctctgcctctgctttttgcttagacacacacacacacacacacacacacacacacacacaaagtgatgtttcctcctcaaataaaatatttgtgttacaccgagacccaaccatcaacaaatannnnnnnnnnnnnnnnnaacaaagaaggagtaaggggtggggcagggnnaggaagacagacgccagagagtaaacaag

SEQ ID NO: 935 - DNA, 266 bp, Mus musculus; identical to SEQ ID NO: 934
  misc_feature (189)..(205): n is a, c, g, or t
  misc_feature (236)..(237): n is a, c, g, or t

SEQ ID NO: 936 - DNA, 376 bp, Mus musculus
  misc_feature (312)..(312): n is a, c, g, or t
  misc_feature (314)..(314): n is a, c, g, or t
  misc_feature (320)..(321): n is a, c, g, or t
  misc_feature (324)..(324): n is a, c, g, or t
  misc_feature (327)..(327): n is a, c, g, or t
  misc_feature (341)..(341): n is a, c, g, or t
  misc_feature (351)..(351): n is a, c, g, or t
gcaccattctagctggttcgaaggggctcatcctgttaacacagagtgccctgggctctgcaacatctgcacttggagcactgaaggttggcaccattttatctgggttctctgcctccaccttggctgcttcccccattggagccaaggctgttgtggctgtgcttgggggagccatgacagtagctgctgtaccacctgcgctgagtgctgtgggcttcaccgcctcaggaattgcagcctcctctctagcagctaagatgatgtccttgtcagctattgctaatgggggtggagtcccagctggtggcntngtggcnnttntgnagtctgctggagcntgctggactntccgtgccatctactgtcatcgtgg

SEQ ID NO: 937 - DNA, 376 bp, Mus musculus; identical to SEQ ID NO: 936
  misc_feature (312)..(312): n is a, c, g, or t
  misc_feature (314)..(314): n is a, c, g, or t
  misc_feature (320)..(321): n is a, c, g, or t
  misc_feature (324)..(324): n is a, c, g, or t
  misc_feature (327)..(327): n is a, c, g, or t
  misc_feature (341)..(341): n is a, c, g, or t
  misc_feature (351)..(351): n is a, c, g, or t

SEQ ID NO: 938 - DNA, 311 bp, Mus musculus
  misc_feature (169)..(169): n is a, c, g, or t
  misc_feature (205)..(205): n is a, c, g, or t
  misc_feature (210)..(210): n is a, c, g, or t
gtaaaggtacctatcaggacggactacccacttggtagaaggagaggaccattttgcaatagttgccgcctaacctcatgcacacctgtatactgtatgcacatgcacatgtacacattagaacagaggcctgcacctttaagccgaatcccataacatgaagacatcnggctacacttgagcatcgttaagctgttttagctanggccntatttcatgactggtcctggctccaccatgtacttggtcaggcatgcagtggtgaactaagtaacgtggtgtgaaacttcctaacaggttataaagagatt

SEQ ID NO: 939 - DNA, 311 bp, Mus musculus; identical to SEQ ID NO: 938
  misc_feature (169)..(169): n is a, c, g, or t
  misc_feature (205)..(205): n is a, c, g, or t
  misc_feature (210)..(210): n is a, c, g, or t

SEQ ID NO: 940 - DNA, 435 bp, Mus musculus
  misc_feature (134)..(134): n is a, c, g, or t
  misc_feature (264)..(264): n is a, c, g, or t
  misc_feature (268)..(268): n is a, c, g, or t
  misc_feature (282)..(282): n is a, c, g, or t
  misc_feature (285)..(285): n is a, c, g, or t
  misc_feature (293)..(294): n is a, c, g, or t
  misc_feature (297)..(297): n is a, c, g, or t
  misc_feature (299)..(299): n is a, c, g, or t
  misc_feature (321)..(321): n is a, c, g, or t
  misc_feature (325)..(325): n is a, c, g, or t
  misc_feature (327)..(327): n is a, c, g, or t
  misc_feature (330)..(330): n is a, c, g, or t
  misc_feature (333)..(333): n is a, c, g, or t
  misc_feature (337)..(337): n is a, c, g, or t
  misc_feature (348)..(348): n is a, c, g, or t
  misc_feature (351)..(351): n is a, c, g, or t
  misc_feature (359)..(359): n is a, c, g, or t
  misc_feature (365)..(365): n is a, c, g, or t
  misc_feature (382)..(382): n is a, c, g, or t
  misc_feature (388)..(388): n is a, c, g, or t
  misc_feature (409)..(409): n is a, c, g, or t
cttccacaggataagaaagttcctccatctttgctgtgtgaggccaaaactggtgccaggctgacatgtcttactgtgtggttagacagagcagcaaatggaatggcgagccttcctccagcagcagagccctnccctgaccaacctaagacaatcgaaaaggaatctggtgacacagttcaggaagaaacatcagaacctaactcggagaaatctgatgtaagtggtgacagcaagcagccaacaaaaggaaatagcccagtnacanccaagaagaggaanatngcaaccanntcngnaaagaagagaaagaagaaaatntaantnacntgncaantcccagatttntcntccctatntgaatntccttttgacggaattntccatntccctgtgagaagaaaatatntccttccgtagaaaatgtgcagctta

SEQ ID NO: 941 - DNA, 435 bp, Mus musculus; identical to SEQ ID NO: 940
  misc_feature (134)..(134): n is a, c, g, or t
  misc_feature (264)..(264): n is a, c, g, or t
  misc_feature (268)..(268): n is a, c, g, or t
  misc_feature (282)..(282): n is a, c, g, or t
  misc_feature (285)..(285): n is a, c, g, or t
  misc_feature (293)..(294): n is a, c, g, or t
  misc_feature (297)..(297): n is a, c, g, or t
  misc_feature (299)..(299): n is a, c, g, or t
  misc_feature (321)..(321): n is a, c, g, or t
  misc_feature (325)..(325): n is a, c, g, or t
  misc_feature (327)..(327): n is a, c, g, or t
  misc_feature (330)..(330): n is a, c, g, or t
  misc_feature (333)..(333): n is a, c, g, or t
  misc_feature (337)..(337): n is a, c, g, or t
  misc_feature (348)..(348): n is a, c, g, or t
  misc_feature (351)..(351): n is a, c, g, or t
  misc_feature (359)..(359): n is a, c, g, or t
  misc_feature (365)..(365): n is a, c, g, or t
  misc_feature (382)..(382): n is a, c, g, or t
  misc_feature (388)..(388): n is a, c, g, or t
  misc_feature (409)..(409): n is a, c, g, or t

SEQ ID NO: 942 - DNA, 308 bp, Mus musculus
  misc_feature (93)..(93): n is a, c, g, or t
ttctgtagcggcagggcttccgcaaaactaacctgctttgtccaggtcaccccagacaccgcccctcacttcatgtactggacgggagccgtncgtccatctgtccctgctggtctctgtctagagagtgctgttcgggatctgctccttctgtcccaggaggtctactggagttagttgtgtggtcaccaagaggactgaggacacagtagccctgagccaagttgggctcatcttccagggagcaaacctaaagctggcagtcagccgccctggctagaggcctgcagtggatgagcgcaaagtgc

SEQ ID NO: 943 - DNA, 308 bp, Mus musculus; identical to SEQ ID NO: 942
  misc_feature (93)..(93): n is a, c, g, or t

SEQ ID NO: 944 - DNA, 576 bp, Mus musculus
  misc_feature (158)..(158): n is a, c, g, or t
  misc_feature (164)..(164): n is a, c, g, or t
  misc_feature (166)..(167): n is a, c, g, or t
  misc_feature (247)..(248): n is a, c, g, or t
  misc_feature (252)..(252): n is a, c, g, or t
  misc_feature (255)..(255): n is a, c, g, or t
  misc_feature (257)..(257): n is a, c, g, or t
  misc_feature (284)..(284): n is a, c, g, or t
  misc_feature (286)..(286): n is a, c, g, or t
  misc_feature (375)..(391): n is a, c, g, or t
  misc_feature (417)..(419): n is a, c, g, or t
  misc_feature (423)..(423): n is a, c, g, or t
  misc_feature (441)..(441): n is a, c, g, or t
  misc_feature (446)..(447): n is a, c, g, or t
ggaagaacagccttttgcatctgaggcgaccatttttacaccatgcagatcttcgtggttatcatctcaaagccatgttcagcagcagcgtttggacagcagtgttctgtgggccctcccctcccccatatcctgcaccccctcatagcagtagtggnttcgcnanntctgttttctgcagtgtcctgtacaaaactgtgctgtgactgtgcggtaggcctggacatggcaaagagaatacagcganncccnttntnttcctaccaaacaactctgtagagctntntgcaccctgtacccttttcaccttttgtatttaattttaaagtcagtgtactgcaaggaggctggatgcaagatagatactatattaannnnnnnnnnnnnnnnngatgtaataaagcagtttgacatgannnaaanaaaaaaaaaaaaaaaaanaaaannagggggccgtttttggagtgaaaagggggtggggggtaagaaacaccttctaaagggggcgcccccctttgaagggggggtgtaacaattgttagggggaaaaaaccctgtgtgtttgggacaaacact

SEQ ID NO: 945 - DNA, 576 bp, Mus musculus; identical to SEQ ID NO: 944
  misc_feature (158)..(158): n is a, c, g, or t
  misc_feature (164)..(164): n is a, c, g, or t
  misc_feature (166)..(167): n is a, c, g, or t
  misc_feature (247)..(248): n is a, c, g, or t
  misc_feature (252)..(252): n is a, c, g, or t
  misc_feature (255)..(255): n is a, c, g, or t
  misc_feature (257)..(257): n is a, c, g, or t
  misc_feature (284)..(284): n is a, c, g, or t
  misc_feature (286)..(286): n is a, c, g, or t
  misc_feature (375)..(391): n is a, c, g, or t
  misc_feature (417)..(419): n is a, c, g, or t
  misc_feature (423)..(423): n is a, c, g, or t
  misc_feature (441)..(441): n is a, c, g, or t
  misc_feature (446)..(447): n is a, c, g, or t

SEQ ID NO: 946 - DNA, 380 bp, Mus musculus
  misc_feature (340)..(340): n is a, c, g, or t
  misc_feature (342)..(342): n is a, c, g, or t
  misc_feature (345)..(345): n is a, c, g, or t
ggacattcttatctcaggacacacacacaaatttgaagcatttgagcatgaaaataaattctacattaacccaggttctgccactggggcctataatgccttggaaacaaacattattccatcgtttgtgctgatggacatccaggcttctactgtggtcacttacgtctatcaactaattggagatgacgtcaaagtagaacgaattgagtataaaaagtcgtaaagccaggctggtctccaccacttattttgtcctcatttcattgtttaaatcaaataattaaacacttaagaggcacacagttgtatcacttttataatactttgcactaaaaantnttntctgttaatccatagttgctctaaagcttcttgta

SEQ ID NO: 947 - DNA, 380 bp, Mus musculus; identical to SEQ ID NO: 946
  misc_feature (340)..(340): n is a, c, g, or t
  misc_feature (342)..(342): n is a, c, g, or t
  misc_feature (345)..(345): n is a, c, g, or t

SEQ ID NO: 948 - DNA, 323 bp, Mus musculus
ctacatctaagttgccctgactggccttcagctggccttacccacttcttcagttaccctgaacatggggagtgcatcacgatagggtgtggctgacctccattgcttacctgcctgagtagccagctgcatccatctctcaaagatacctagccaggctcctaaccatgttcttcaaccattgattttgtttgatttctgatgtggaagtgcggtcattcctggtttaactcacagcaacttttaattggtctaagatgagggcatccctcagttggtccattgtaatgatgatcgtcctcatctgagtgacagttactgcc

SEQ ID NO: 949 - DNA, 323 bp, Mus musculus; identical to SEQ ID NO: 948

SEQ ID NO: 950 - DNA, 546 bp, Mus musculus
  misc_feature (115)..(115): n is a, c, g, or t
  misc_feature (130)..(130): n is a, c, g, or t
  misc_feature (149)..(155): n is a, c, g, or t
  misc_feature (195)..(209): n is a, c, g, or t
  misc_feature (236)..(252): n is a, c, g, or t
  misc_feature (426)..(426): n is a, c, g, or t
cctatcatcatggaaggagccaaccagccagagacggagagcagaagccagtaggggctgagcatgaagattcagttcctggacactaagactgttgttatatccagctcagacntgcgagccacaggcntggcctccagtatcatgannnnnnncttgggccttacctggtccagcccttggttctgggttctnnnnnnnnnnnnnnnacctctggctttgagacatgcccaaannnnnnnnnnnnnnnnntcatggcgtgctaagccagtgcctcagaactcaggaggccagcctggggtccagaagatgaccaccttaccttaggacagccactggactcagcttgtggaggggggtctgctgggctggagtcctgtgcctggggggggtctcctgctgcttaggtccttttgggaccccccngcccatctgtaccctttctttgcacacttcttccctcacccctgttgccctctcctcacttcggtgttgggcctggagggggtgggggtggggtaagggttggccctttaccatttcatg

SEQ ID NO: 951 - DNA, 546 bp, Mus musculus; identical to SEQ ID NO: 950
  misc_feature (115)..(115): n is a, c, g, or t
  misc_feature (130)..(130): n is a, c, g, or t
  misc_feature (149)..(155): n is a, c, g, or t
  misc_feature (195)..(209): n is a, c, g, or t
  misc_feature (236)..(252): n is a, c, g, or t
  misc_feature (426)..(426): n is a, c, g, or t

SEQ ID NO: 952 - DNA, 235 bp, Mus musculus
  misc_feature (26)..(50): n is a, c, g, or t
  misc_feature (120)..(146): n is a, c, g, or t
tctccaccttaaaggaggctgaccannnnnnnnnnnnnnnnnnnnnnnnnttcatctgacctccagaccaaagactgcagtcggcagggctgcccttgcctaggaagcccaaggttggannnnnnnnnnnnnnnnnnnnnnnnnnncttccaggttattagacgccgctgctcgtaactctgtgaagatgcagcccacgtcatgcctctgtctgtcttgttctcagaaccactgt

SEQ ID NO: 953 - DNA, 235 bp, Mus musculus; identical to SEQ ID NO: 952
  misc_feature (26)..(50): n is a, c, g, or t
  misc_feature (120)..(146): n is a, c, g, or t

SEQ ID NO: 954 - DNA, 277 bp, Mus musculus
  misc_feature (33)..(33): n is a, c, g, or t
  misc_feature (120)..(136): n is a, c, g, or t
  misc_feature (142)..(143): n is a, c, g, or t
  misc_feature (192)..(192): n is a, c, g, or t
agccttcgcgctgctacagctacagctgcgcgnccacgatgcagcccgccgcctgcgcgccctcgcggatcagccgcccggtgccctgcgtcgccgcgtcgtgaggttcaaggacacttnnnnnnnnnnnnnnnnncgtggnntccgggaccgtccagggcagcagaagggtccgggcgccaaagcgtaacnacggactggaccctcccgggccgaggtcacgtacccgtcccttcagtgatctacaccgacctcagcagtcacgagtcatctccag

SEQ ID NO: 955 - DNA, 277 bp, Mus musculus; identical to SEQ ID NO: 954
  misc_feature (33)..(33): n is a, c, g, or t
  misc_feature (120)..(136): n is a, c, g, or t
  misc_feature (142)..(143): n is a, c, g, or t
  misc_feature (192)..(192): n is a, c, g, or t

SEQ ID NO: 956 - DNA, 578 bp, Mus musculus
  misc_feature (29)..(29): n is a, c, g, or t
  misc_feature (33)..(33): n is a, c, g, or t
  misc_feature (38)..(39): n is a, c, g, or t
  misc_feature (54)..(55): n is a, c, g, or t
  misc_feature (69)..(69): n is a, c, g, or t
  misc_feature (77)..(77): n is a, c, g, or t
  misc_feature (82)..(82): n is a, c, g, or t
  misc_feature (115)..(115): n is a, c, g, or t
  misc_feature (147)..(147): n is a, c, g, or t
  misc_feature (156)..(156): n is a, c, g, or t
  misc_feature (159)..(159): n is a, c, g, or t
  misc_feature (184)..(184): n is a, c, g, or t
  misc_feature (246)..(246): n is a, c, g, or t
  misc_feature (279)..(279): n is a, c, g, or t
gagatcctcacctcgggagcatacagccntatnactgnntatggacatcgtcgnnagctccactccacntctcctcntaccnttgccttcagtctgtcaagtgtcagctttcctnaggtccatccccttccagttaaaacaggaganggtggtacnaanactcctggcgctgggcgtctgtgcnactgtgtcacttggcatgagacaaggagggagaagcgaagaggagagatggctttctgtccntgtggcttctcaaagactctacaggatgccgtnggggcacaatgggatacgtcaggatgggactccgggcctcgccaggttttgggtttggggtcctctcaataaactgtttatttcttgaacttaacccctctgctccttcccctctgccaggttacaaggcgagtaggccctacataggccccaaccacagtagccttagctggtcactcacggagcacaacgcagctcatctgccctataaaccgcttggccgacgaatcctcattgagttctttcattaccatgtaaagtgaaatacactcactcacctttactatacacaggctgtg

SEQ ID NO: 957 - DNA, 578 bp, Mus musculus; identical to SEQ ID NO: 956
  misc_feature (29)..(29): n is a, c, g, or t
  misc_feature (33)..(33): n is a, c, g, or t
  misc_feature (38)..(39): n is a, c, g, or t
  misc_feature (54)..(55): n is a, c, g, or t
  misc_feature (69)..(69): n is a, c, g, or t
  misc_feature (77)..(77): n is a, c, g, or t
  misc_feature (82)..(82): n is a, c, g, or t
  misc_feature (115)..(115): n is a, c, g, or t
  misc_feature (147)..(147): n is a, c, g, or t
  misc_feature (156)..(156): n is a, c, g, or t
  misc_feature (159)..(159): n is a, c, g, or t
  misc_feature (184)..(184): n is a, c, g, or t
  misc_feature (246)..(246): n is a, c, g, or t
  misc_feature (279)..(279): n is a, c, g, or t

SEQ ID NO: 958 - DNA, 569 bp, Mus musculus
  misc_feature (145)..(159): n is a, c, g, or t
  misc_feature (214)..(214): n is a, c, g, or t
  misc_feature (232)..(232): n is a, c, g, or t
  misc_feature (379)..(379): n is a, c, g, or t
  misc_feature (381)..(381): n is a, c, g, or t
  misc_feature (444)..(458): n is a, c, g, or t
  misc_feature (463)..(463): n is a, c, g, or t
  misc_feature (506)..(506): n is a, c, g, or t
agctcaccaagagctagaacttttgcttggtacccaaaggttttatttgggattagcccggagcctgagcactcttccattgtcacagctgtcccttgaaggctgacttctgcctaggtgtttgagagcctttatctaccattannnnnnnnnnnnnnnccctctgtctatgcttgaggtcctctttgtgtcctccttggccctatggtgagtntcatctgtgtgtcctgcntggatgctgtgaacctgttagctgaggaagctaagactgagagaaagcagccctggagctcagcttttatcatctgcatcatcctggtttaggggtcctggacagcaccccatcaaccagtgagagtgtgagggcctgcagctgcangntccacccactggcagctgggccacgcactgtgtcctccttggtgccatctcacctgccacacnnnnnnnnnnnnnnnacctntacctgtggattgcaggttgggctcccaaacaacacagaccantcttccctcatccctccccagagggacatgactttctttcagcactgtttgtattgaaacaaa

SEQ ID NO: 959 - DNA, 569 bp, Mus musculus; identical to SEQ ID NO: 958
  misc_feature (145)..(159): n is a, c, g, or t
  misc_feature (214)..(214): n is a, c, g, or t
  misc_feature (232)..(232): n is a, c, g, or t
  misc_feature (379)..(379): n is a, c, g, or t
  misc_feature (381)..(381): n is a, c, g, or t
  misc_feature (444)..(458): n is a, c, g, or t
  misc_feature (463)..(463): n is a, c, g, or t
  misc_feature (506)..(506): n is a, c, g, or t

SEQ ID NO: 960 - DNA, 215 bp, Mus musculus
caaatgttgattgcttttcaaagctttccccttatctgtcattgtctttgtatatagtgcagattgttgcttgtaagaaaggctaataaggaaccaaactcttgtaagtaatgtaaataaaaaggtgggtagatcatgttttcaatatactctactacctcagtttacttgaatactgaattagagcttactctctgcttgtgtgggctaagata

SEQ ID NO: 961 - DNA, 215 bp, Mus musculus; identical to SEQ ID NO: 960

SEQ ID NO: 962 - DNA, 237 bp, Mus musculus
caaacttcagtaccgaccattatacccctatgagcagaatatttcctaacaatcctcaatttacactagtagaagtaatatctttaaaaactgttctttctttaagtgttcctttctttcaaatgttgattgcttttcaaagctttccccttatctgtcattgtctttgtatatagtgcagattgttgcttgtaagaaaggctaataaggaaccaaactcttgtaagtaatgtaaat

SEQ ID NO: 963 - DNA, 237 bp, Mus musculus; identical to SEQ ID NO: 962

SEQ ID NO: 964 - DNA, 348 bp, Mus musculus
  misc_feature (322)..(322): n is a, c, g, or t
cgtcctgactcatctatttgtgtcttggctacagtaaacctctttttttgtcttctcactatgtgtaattatggcgactgcttatgttttctgtaatagtggggtaaagcttatgatgacagactgaaaaggtcaaaacatgttgaaggaaccaatcgggattttgatgactgccagatgagagaaatttagcagaagcgtttcgatttcaaatttcatgaataggtgggcttggtagttataaaactgtatactgtgtctttaagattacataaatagtctgaaacctttagtagtgattacttaaaatatgttgtgttcnccatgttttcttgtcttgtaaccaag

SEQ ID NO: 965 - DNA, 348 bp, Mus musculus; identical to SEQ ID NO: 964
  misc_feature (322)..(322): n is a, c, g, or t

SEQ ID NO: 966 - DNA, 527 bp, Mus musculus
  misc_feature (250)..(250): n is a, c, g, or t
  misc_feature (281)..(281): n is a, c, g, or t
  misc_feature (286)..(286): n is a, c, g, or t
ttagcttcaaagacaatgagacaaaattcatttggtttattagtgcaaagcaaatcacacacacacacacacacacacacacacacacacacacacacacacacacgcacacgcctaggatatgactaagaagcgtgagaacaacattctacaaggacattcaacatacacaagagcatgctgtgagcgcaaaccaaacatgggcggtgaggagtcaccacaggtcgccacgggtcctccacagttcagnggtggcacaagagaaaaccaaaaccaaacanaaccnagttcacattgtgagttctagaccagccagggatacatggtaagaacctgtcgtaaagacacaacataacaaaataccccagtaaaaacccaacccaaaccttacaaaactgtcagggaaattgacatttcctgtcttctcttgctcatgtctctgaagcctgcttccatccctgcaaagccctctgtctccaggaccatcccgcactgcccacccctgccctttggctctgaagccatct

SEQ ID NO: 967 - DNA, 527 bp, Mus musculus; identical to SEQ ID NO: 966
  misc_feature (250)..(250): n is a, c, g, or t
  misc_feature (281)..(281): n is a, c, g, or t
  misc_feature (286)..(286): n is a, c, g, or t

SEQ ID NO: 968 - DNA, 479 bp, Mus musculus
atgcttctccactctgtgttgtgtgaacaaaaaagctccctacccacaaaaaacccaaaaacttgttttaagttttttattattatatagcagttatttaccacatagtggaaagtattgaaacttcaaagttgaagcatgtgagagtagctttttgagtgtgtaagcctacatttgactggatgtgaaatggagccatgcaatgatgagcgaagtatagtctgacctggtattgccattgctttggcgctggctctgaccagggtgtgaccccttaatcttctctctgagctgattctgctgaccacatgggggtatttgaacctatgtggatcctggcttataatgtgtaagagtatttcttttgtatcctttgaattactgatactttcatgttttccttcttaggtccaggtgagaaatcagggttgaaaactgcatggaggattcatcatttctgccctgaattggaatcaatt

SEQ ID NO: 969 - DNA, 479 bp, Mus musculus; identical to SEQ ID NO: 968

SEQ ID NO: 970 - DNA, 507 bp, Mus musculus
tatatccgaggtccagcctccactacatttcttcccgactcacccacagcctctgttgctactgtcgctgctgctgctgccgccgcagcccccaccctacggaaactctcggcttccccggagccggaggcgccactgacagcgacatcacttccgcccggcgccgcagccaatcagcggctgggcctgcggcctcttgaccagcgggccgagctccgggcgctccgccgacagcttctgtcacaggcccgtgagggctgtgggagttccggcgcctcgaatcctcgtgtcctccgccacaggaccccctccgccacagggccctcgtccttcatggcgtcctctgtaaggaccatcccggttccgacctctaaacacccctcgcggctcttctccgtcggactgccatagccttgactcttccccataaactcctcagagaggctctcgcctccatccggccgccgtctctctggcccgcgtgtccctcgggctccgcttgggtct

SEQ ID NO: 971 - DNA, 507 bp, Mus musculus; identical to SEQ ID NO: 970

SEQ ID NO: 972 - DNA, 553 bp, Mus musculus
  misc_feature (190)..(190): n is a, c, g, or t
  misc_feature (203)..(203): n is a, c, g, or t
  misc_feature (208)..(208): n is a, c, g, or t
  misc_feature (216)..(218): n is a, c, g, or t
  misc_feature (230)..(230): n is a, c, g, or t
  misc_feature (292)..(293): n is a, c, g, or t
  misc_feature (295)..(295): n is a, c, g, or t
gattgcaatcatagcgctggagaggtggaggcaggagcatccccggctctcgttgttcagctagcctagcttaatcagcaagctccaggccaatgagaaacccccatatctcatagaaagtggacagctcctgaagacgtgagattatcttccagcctctacgtgtccgagcacacacatgatgtgcacntctcccacagggnagcangggccttnnngaaggcaacaanggcagcgacgaaacaggacaggtgccatatggggagatggccagcttgcaggggagcacgtnnantagtggtaattctgcttgctcccacagaggatgcctcattcttgccttgtgcttcctgattggaaaacacttgtcacctgtcaccccttgattactcattggtcaaaaccagcacccactctctctggtgacagttatctccattagggatgttctctggagtgcagagtcttttcactaagacaatatgagaaccacagactctatcgatcttctatttttggataaaacatttgataccaattcagaaatgcactg

SEQ ID NO: 973 - DNA, 553 bp, Mus musculus; identical to SEQ ID NO: 972
  misc_feature (190)..(190): n is a, c, g, or t
  misc_feature (203)..(203): n is a, c, g, or t
  misc_feature (208)..(208): n is a, c, g, or t
  misc_feature (216)..(218): n is a, c, g, or t
  misc_feature (230)..(230): n is a, c, g, or t
  misc_feature (292)..(293): n is a, c, g, or t
  misc_feature (295)..(295): n is a, c, g, or t

SEQ ID NO: 974 - DNA, 508 bp, Mus musculus
  misc_feature (101)..(101): n is a, c, g, or t
  misc_feature (104)..(108): n is a, c, g, or t
  misc_feature (111)..(112): n is a, c, g, or t
  misc_feature (114)..(114): n is a, c, g, or t
agctcgttgggtcatataaacacatacacacacactaaagacatgaaaacaaaagaggatagtggaagagtgtaggggacagaaaagggtaatgagtggtnatnnnnnacnngntcaaaatgatgttcttgtatgaaaatgccataaagaaacctttatgtataattaatatatgctgatagaataaaataaaaggcattgttattcctccacctccggtcccccataatggaacactttgtactctgagttgtacatcttgcttttccacttaacaatgaatgctggagatactatctgttgaaggatacagaacacccttgatcttttttcccacacacatatgtaattgtctactgaatgactcattggctgataccatgatgccttacttatccagggtcctgggggcgtgtctggctagtcttagttcctttgttacatcatccctaagaacagaacttcatccagccagctgggcttcattcagacaccatagagcaaccag

SEQ ID NO: 975 - DNA, 508 bp, Mus musculus; identical to SEQ ID NO: 974
  misc_feature (101)..(101): n is a, c, g, or t
  misc_feature (104)..(108): n is a, c, g, or t
  misc_feature (111)..(112): n is a, c, g, or t
  misc_feature (114)..(114): n is a, c, g, or t

SEQ ID NO: 976 - DNA, 445 bp, Mus musculus
cagcactgcttcaggctccagtggtccagggaaaactgtacgcgggtgggacagaagctatccggacgtgtacagaggctgcagctgtaaatgcgacgtcttctgcggcgccctgtattcaataggagtcaaagccaccgatgaagtcaaagctgtcctcctcttccaggaatactttgctcacataacaggcaaacacgaagccgaacagagctaggaagatctgcagggcactactgagggcttcaatgtaaggataatcaagcaggcagccagtgaccgagatgacgtggtggtcctccagggccaggcgagagttcagaacaggagtcaccaggcagcctggaccattctccatccaccaggagcgatgcagggatgtgttgaaggtcatgatgaagtcccggtcctggggggcagaggggcctgggatagctgtccaact

SEQ ID NO: 977 - DNA, 445 bp, Mus musculus; identical to SEQ ID NO: 976

SEQ ID NO: 978 - DNA, 222 bp, Mus musculus
  misc_feature (28)..(28): n is a, c, g, or t
aagtctgttcctagactgggcctggtgncacattccattaatcctaaggttttgagttggaggccaggctggtctacataatgagacctgatctcagaaacaatgcaattaatccaaaagagactgcatctaaagccctgcaccgaagacagtgattagcattgtgcttagagcttagagtcatggtcctcacggcactgttgctgcgctcggtacattgtt

SEQ ID NO: 979 - DNA, 222 bp, Mus musculus; identical to SEQ ID NO: 978
  misc_feature (28)..(28): n is a, c, g, or t

SEQ ID NO: 980 - DNA, 564 bp, Mus musculus
  misc_feature (29)..(29): n is a, c, g, or t
  misc_feature (34)..(34): n is a, c, g, or t
  misc_feature (42)..(42): n is a, c, g, or t
  misc_feature (51)..(51): n is a, c, g, or t
  misc_feature (54)..(54): n is a, c, g, or t
  misc_feature (60)..(60): n is a, c, g, or t
  misc_feature (64)..(64): n is a, c, g, or t
  misc_feature (72)..(72): n is a, c, g, or t
  misc_feature (77)..(77): n is a, c, g, or t
  misc_feature (84)..(84): n is a, c, g, or t
  misc_feature (99)..(99): n is a, c, g, or t
  misc_feature (101)..(101): n is a, c, g, or t
  misc_feature (109)..(109): n is a, c, g, or t
  misc_feature (120)..(120): n is a, c, g, or t
  misc_feature (136)..(136): n is a, c, g, or t
  misc_feature (142)..(142): n is a, c, g, or t
  misc_feature (155)..(155): n is a, c, g, or t
  misc_feature (175)..(175): n is a, c, g, or t
  misc_feature (213)..(213): n is a, c, g, or t
  misc_feature (232)..(232): n is a, c, g, or t
  misc_feature (279)..(279): n is a, c, g, or t
aagcagctaaaggtcccttttcaggaaangtttngttgcgcntttttttgnttngtttgntttnaaggaaangctgntctttgntcagtatagtatttngnaagtgaancatggtaacangtacttttaaaataangatgcnacagtttatattngaaaataaaaacttcctgcnggtgggatcatttatagttccttatttttaagaaaatntgtctttccattttatatngctccttaaagtttaatattaaaaatgtgataaccacatagtactcngcttttctgctgaccattttgaatctgttttggtcaaacttcatttgggtcccagcatttagaagaatgccagtcatcataatgcctctgttctcattttcagtgtgaaggaaagtagctaaacagtgtacttgacatcgtcaaaagttgttttgatttgctggtacatagggatgacttgttgaggaacatacattttcttgactcactctaatggatatagttgtaaaatagatatgtgctagacttaccaattcaaaagttttgttcttcctaggttgtcag

SEQ ID NO: 981 - DNA, 564 bp, Mus musculus; identical to SEQ ID NO: 980
  misc_feature (29)..(29): n is a, c, g, or t
  misc_feature (34)..(34): n is a, c, g, or t
  misc_feature (42)..(42): n is a, c, g, or t
  misc_feature (51)..(51): n is a, c, g, or t
  misc_feature (54)..(54): n is a, c, g, or t
  misc_feature (60)..(60): n is a, c, g, or t
  misc_feature (64)..(64): n is a, c, g, or t
  misc_feature (72)..(72): n is a, c, g, or t
  misc_feature (77)..(77): n is a, c, g, or t
  misc_feature (84)..(84): n is a, c, g, or t
  misc_feature (99)..(99): n is a, c, g, or t
  misc_feature (101)..(101): n is a, c, g, or t
  misc_feature (109)..(109): n is a, c, g, or t
  misc_feature (120)..(120): n is a, c, g, or t
  misc_feature (136)..(136): n is a, c, g, or t
  misc_feature (142)..(142): n is a, c, g, or t
  misc_feature (155)..(155): n is a, c, g, or t
  misc_feature (175)..(175): n is a, c, g, or t
  misc_feature (213)..(213): n is a, c, g, or t
  misc_feature (232)..(232): n is a, c, g, or t
  misc_feature (279)..(279): n is a, c, g, or t

SEQ ID NO: 982 - DNA, 408 bp, Mus musculus
  misc_feature (93)..(93): n is a, c, g, or t
  misc_feature (189)..(189): n is a, c, g, or t
  misc_feature (196)..(196): n is a, c, g, or t
ggcacgagggcagtctccgccgctagcccgggctcggcaagcaggcacacgcacgctgggcgggactaggccgcgggctgttccggcagcgcngttccccggaggccgtacgggcaggaacgttaccgggccacgtcatccgccccggcagccctcactcccgggggagtgaccaatcctgcgcctgcncgctggntggacacgtggcttcgcttcactcaggctcctcccaccgctgggaaggctccgctcgacccgccccctcctcgcgtcttcaagagaagcccctaagaggtccctgcagcgccacctaaggtacctgggtctctattggtctgagtctcaataattgtggacatcttggtcagcatggtggcgcatgcttctaatcccaattatagccagagg

SEQ ID NO: 983 - DNA, 408 bp, Mus musculus; identical to SEQ ID NO: 982
  misc_feature (93)..(93): n is a, c, g, or t
  misc_feature (189)..(189): n is a, c, g, or t
  misc_feature (196)..(196): n is a, c, g, or t

SEQ ID NO: 984 - DNA, 481 bp, Mus musculus
  misc_feature (137)..(137): n is a, c, g, or t
  misc_feature (181)..(182): n is a, c, g, or t
  misc_feature (374)..(374): n is a, c, g, or t
gcttatttcttccaacttggagctctactcttcactggccaccttccgagagttgttacagctaataggatgttgaagcagatgcttttccggtatcaaggttacattggtgcaaccctagttttgaggagagtagncagtactggtcctcatctctacagcatctatcctcatggatcanntgataaatcgccttatgtcactgtgggttctggctccttggcagcaatggctgtgtttgaaggttaaatttaggctggatatggaggagaaagaagctagtgagtgaggctattgcagctaagcatctttattgactgagggtctggaagcaacattgatctgcgtgttatcagcaagagcaagctggactntcttcgttcatactcagtgcccaacaagaaagggaccggatttggccggtacagatgtgagaaaggcactaccgctgtcctcactgagaaagccacccttctggaga

SEQ ID NO: 985 - DNA, 481 bp, Mus musculus; identical to SEQ ID NO: 984
  misc_feature (137)..(137): n is a, c, g, or t
  misc_feature (181)..(182): n is a, c, g, or t
  misc_feature (374)..(374): n is a, c, g, or t

SEQ ID NO: 986 - DNA, 527 bp, Mus musculus
  misc_feature (139)..(140): n is a, c, g, or t
  misc_feature (142)..(142): n is a, c, g, or t
  misc_feature (146)..(149): n is a, c, g, or t
  misc_feature (151)..(154): n is a, c, g, or t
  misc_feature (156)..(156): n is a, c, g, or t
  misc_feature (327)..(327): n is a, c, g, or t
  misc_feature (403)..(403): n is a, c, g, or t
  misc_feature (427)..(427): n is a, c, g, or t
  misc_feature (432)..(432): n is a, c, g, or t
  misc_feature (446)..(446): n is a, c, g, or t
  misc_feature (458)..(458): n is a, c, g, or t
  misc_feature (462)..(462): n is a, c, g, or t
  misc_feature (469)..(470): n is a, c, g, or t
  misc_feature (476)..(476): n is a, c, g, or t
  misc_feature (480)..(480): n is a, c, g, or t
  misc_feature (487)..(487): n is a, c, g, or t
  misc_feature (489)..(490): n is a, c, g, or t
  misc_feature (494)..(494): n is a, c, g, or t
  misc_feature (496)..(496): n is a, c, g, or t
aagacttcttaaatccactccagggaatacttgaaaggcaagtcattgtgactaacacttcagttcattggcccatgatcatttcagattttaacagctgttactgttattggagatcggagagttggcctgttagaanntnaaannnncnnnncngcttgccgttcctctggtttgtgaagtttcactcgttgcctaaaatgcccgatgcctcgtctccagaccttgctgcccttgcctggtcatcttttgtacagtaattgtaaatgggcagtggagactattggtgttcctgaggggcaatgggcaggtcactcttccgatctncctactaccagccaggtgctggtttctttctgagctgtgggagatcacaccatcctgtcgccctgcaaataattgngggatcatttacccttgaggctgnagagngggttccaggactnttactttactgngganggacttnnaacatnaggnggctttntnngttncnggcccctttactcctgccaaccttgggataa

SEQ ID NO: 987 - DNA, 527 bp, Mus musculus; identical to SEQ ID NO: 986
  misc_feature (139)..(140): n is a, c, g, or t
  misc_feature (142)..(142): n is a, c, g, or t
  misc_feature (146)..(149): n is a, c, g, or t
  misc_feature (151)..(154): n is a, c, g, or t
  misc_feature (156)..(156): n is a, c, g, or t
  misc_feature (327)..(327): n is a, c, g, or t
  misc_feature (403)..(403): n is a, c, g, or t
  misc_feature (427)..(427): n is a, c, g, or t
  misc_feature (432)..(432): n is a, c, g, or t
  misc_feature (446)..(446): n is a, c, g, or t
  misc_feature (458)..(458): n is a, c, g, or t
  misc_feature (462)..(462): n is a, c, g, or t
  misc_feature (469)..(470): n is a, c, g, or t
  misc_feature (476)..(476): n is a, c, g, or t
  misc_feature (480)..(480): n is a, c, g, or t
  misc_feature (487)..(487): n is a, c, g, or t
  misc_feature (489)..(490): n is a, c, g, or t
  misc_feature (494)..(494): n is a, c, g, or t
  misc_feature (496)..(496): n is a, c, g, or t

SEQ ID NO: 988 - DNA, 399 bp, Mus musculus
  misc_feature (259)..(259): n is a, c, g, or t
aacacaggttaagtctgcccttcttactggtccccccaaagtccgtgcctgcgtccagcttgtcagtgaaagaattcatcaaatgtcccatcaaatgttccagaagtttcaaatctcagccaagggctggcgcactccaatgctgttctctaagtgtcacaggggaccactcactgctggcttaggttgacacctctgtcagacagtctgtatcttgaccagaggcatccctctggtaagaggcagtgaggactgaganccggagcctggactgtactgagaggcccttcacaggactcttggcacaggtcttagtcttgccttcaggatgcactcaaggtggcccagaaggaagactcaagaccataggaggcagagtctggcctccatgcctgtgga

SEQ ID NO: 989 - DNA, 399 bp, Mus musculus; identical to SEQ ID NO: 988
  misc_feature (259)..(259): n is a, c, g, or t

SEQ ID NO: 990 - DNA, 579 bp, Mus musculus
  misc_feature (107)..(107): n is a, c, g, or t
  misc_feature (474)..(475): n is a, c, g, or t
  misc_feature (477)..(483): n is a, c, g, or t
  misc_feature (486)..(488): n is a, c, g, or t
  misc_feature (490)..(491): n is a, c, g, or t
  misc_feature (493)..(502): n is a, c, g, or t
  misc_feature (504)..(515): n is a, c, g, or t
  misc_feature (517)..(529): n is a, c, g, or t
  misc_feature (531)..(532): n is a, c, g, or t
  misc_feature (535)..(535): n is a, c, g, or t
  misc_feature (550)..(550): n is a, c, g, or t
  misc_feature (554)..(554): n is a, c, g, or t
gacatcatccgcatgatatcagtaaatatcttccggaccctgccacccagcgagaaccctgagtttgaccctgaagaagatgagcccaaccttgagccctcgtggcnacatctgcagctggtatatgagtttttcctgcgtttcttggagagtccagatttccagccctctgtggccaagagatacgtggatcaaaagtttgtcctaatgctcctggagctatttgacagcgaggacccccgggaacgtgagtacctcaagaccatcttgcatcgggtgtacggcaagttcctgggtctccgggcctacatccgcaaacagtgcaaccacatcttcctccggttcatctacgagctggaacacttcaatggtgtggctgagctcttagagatcttaggaagcatcatcaatggctttgcgctgcccctgaagactgagcacaagcagttcctggttcgagtcctgatccccttnnannnnnnnaannnannannnnnnnnnnannnnnnnnnnnnannnnnnnnnnnnnanntcntggagaaggatgcancctngacagagcatgttatccgggggctt

SEQ ID NO: 991 - DNA, 579 bp, Mus musculus; identical to SEQ ID NO: 990
  misc_feature (107)..(107): n is a, c, g, or t
  misc_feature (474)..(475): n is a, c, g, or t
  misc_feature (477)..(483): n is a, c, g, or t
  misc_feature (486)..(488): n is a, c, g, or t
  misc_feature (490)..(491): n is a, c, g, or t
  misc_feature (493)..(502): n is a, c, g, or t
  misc_feature (504)..(515): n is a, c, g, or t
  misc_feature (517)..(529): n is a, c, g, or t
  misc_feature (531)..(532): n is a, c, g, or t
  misc_feature (535)..(535): n is a, c, g, or t
  misc_feature (550)..(550): n is a, c, g, or t
  misc_feature (554)..(554): n is a, c, g, or t

SEQ ID NO: 992 - DNA, 417 bp, Mus musculus
gactttcgtggctgggcccatggcctcctgcgcgagcatcgacattgaggacgccacgcagcatctgcgggacatactcaaactggaccggcccgccggaggttccaatgccgaaagccaaaggccatccagtgcctacaatggagacctcaatgggctcctggtccccgacccgctcagttcaggtgatggtaactcaacgaacaaacctggtatacggaccatgccacccattaacctgcaggaaaagcaggtcatttgcctctctggagatgacagctccacctgcattgggattttagccaaggaagtggaaattgtggccagcagtgattctagcatttccagcaaggctcgggggagcaacaaggtgaaaatccagcctgtcgccaagtatgactgggagcagaaataccg

SEQ ID NO: 993 - DNA, 417 bp, Mus musculus; identical to SEQ ID NO: 992

SEQ ID NO: 994 - DNA, 453 bp, Mus musculus
  misc_feature (158)..(159): n is a, c, g, or t
  misc_feature (363)..(363): n is a, c, g, or t
ggctcaggaaacacttagttaaaagtgaaaaaaggggaaataacaaaaaggaacaaagatggaagacatgtccattacagcttagatccaaatgtcctcacctgtctagagccataccaccccaaatgtgcctgatctcatctgaaatgtcacccagnnagaagctcacctgtcaaggacttggttcccatgcagcagtgttcagaggtgggacctctggtaatgggaccacaagggccctgaccccatcaatggatcaatccatgataaactcgcagcttcaatggcctctggaaacaggaacataaagggagtgggactgtgttagaggaagtctattatcagggacatgccctggaaggntgtgttgccccaaataacttcctcttgcttcctctctgcttcctggctgaaggggagggggggagcagttgagttccagcatgctggccc

SEQ ID NO: 995 - DNA, 453 bp, Mus musculus; identical to SEQ ID NO: 994
  misc_feature (158)..(159): n is a, c, g, or t
  misc_feature (363)..(363): n is a, c, g, or t

SEQ ID NO: 996 - DNA, 446 bp, Mus musculus
  misc_feature (361)..(361): n is a, c, g, or t
atagtgggctctctccgggctgctatctggggaaatctcaagtctcctcagaggctgcctccaggatctctcctccactgacttctgggaactgtactgtgctgctgctctcccccagcgacttccataagtggcagtcattccagccttaagcatgtcatagtccctagtgacaggtgactgccgtccaacaaagtcattctcaaccacgtgtagcttgtagacatactcagggacactgctggttcggtgaaggttcccgctgaccgcagagctccggccccggcgggccagggtctgctgcacctgctcctggatccgctggctccgggccgccgggtcgccgcggccgctgctgccngccagcctcagtctggcctcggagggcaaggccaggctggagctgtccaggtgacccaggatctgctggcccagcacagtccgga

SEQ ID NO: 997 - DNA, 446 bp, Mus musculus; identical to SEQ ID NO: 996
  misc_feature (361)..(361): n is a, c, g, or t

SEQ ID NO: 998 - DNA, 258 bp, Mus musculus
caggtcctcgggaaccctatggccaatgccaacaaccctatgaatccaggtggcaaccccatggcatcaggcatgagcaccagcaaccccggcatcaactccccacagttcgcagggcaacagcaacagttctccaccaaagctggccctgcacagccctatatccagcccaacatgtacggccgacctggctaccctggtagcgggggctttggggccagttaccctgggggtcctagtgccccagcaggcatgggc

SEQ ID NO: 999 - DNA, 258 bp, Mus musculus; identical to SEQ ID NO: 998

SEQ ID NO: 1000 - DNA, 289 bp, Mus musculus
  misc_feature (193)..(193): n is a, c, g, or t
  misc_feature (196)..(197): n is a, c, g, or t
  misc_feature (199)..(200): n is a, c, g, or t
  misc_feature (206)..(206): n is a, c, g, or t
  misc_feature (208)..(208): n is a, c, g, or t
  misc_feature (212)..(212): n is a, c, g, or t
  misc_feature (216)..(216): n is a, c, g, or t
  misc_feature (220)..(220): n is a, c, g, or t
  misc_feature (222)..(222): n is a, c, g, or t
  misc_feature (224)..(224): n is a, c, g, or t
  misc_feature (232)..(232): n is a, c, g, or t
  misc_feature (238)..(238): n is a, c, g, or t
  misc_feature (243)..(243): n is a, c, g, or t
  misc_feature (263)..(263): n is a, c, g, or t
gaaagaccaaaaacttatcggaatgccatttttgtgaaggatctttttaggggcggtctgggtctcacacggcctttgtttgcctgcactctaaagaagtatcctaggccctgtcttcacccctccagactccggggggggtgcactttaaagtcatcttcgtcattttgtgtttgttgtgagcagttttctntgnntnnctagangnacancgantccntntnatttactntgtganctctntctgtacataactggaattnggatggcaaactgtacataggctgtt

SEQ ID NO: 1001 - DNA, 289 bp, Mus musculus; identical to SEQ ID NO: 1000
  misc_feature (193)..(193): n is a, c, g, or t
  misc_feature (196)..(197): n is a, c, g, or t
  misc_feature (199)..(200): n is a, c, g, or t
  misc_feature (206)..(206): n is a, c, g, or t
  misc_feature (208)..(208): n is a, c, g, or t
  misc_feature (212)..(212): n is a, c, g, or t
  misc_feature (216)..(216): n is a, c, g, or t
  misc_feature (220)..(220): n is a, c, g, or t
  misc_feature (222)..(222): n is a, c, g, or t
  misc_feature (224)..(224): n is a, c, g, or t
  misc_feature (232)..(232): n is a, c, g, or t
  misc_feature (238)..(238): n is a, c, g, or t
  misc_feature (243)..(243): n is a, c, g, or t
  misc_feature (263)..(263): n is a, c, g, or t

SEQ ID NO: 1002 - DNA, 296 bp, Mus musculus
  misc_feature (109)..(111): n is a, c, g, or t
  misc_feature (113)..(117): n is a, c, g, or t
  misc_feature (238)..(238): n is a, c, g, or t
catttttgctatctgccaggttttattaaaaagaagactatgtattattttctaaagaaactcatatttttgtacaaacttatgtttccaagtaaggaagaaatagatnnngnnnnnggcagaacatagcagtgtttccccctggctaggtcagtgtcccagagcccgtggtggccacagacatgcccggtcaccatgctgccctcctgtgctggcacggcctcagcagggtcacatncagtaactctcacctgacactaaagaaggaaaaagaagttctgtgctcatgactttat

SEQ ID NO: 1003 - DNA, 296 bp, Mus musculus; identical to SEQ ID NO: 1002
  misc_feature (109)..(111): n is a, c, g, or t
  misc_feature (113)..(117): n is a, c, g, or t
  misc_feature (238)..(238): n is a, c, g, or t

SEQ ID NO: 1004 - DNA, 172 bp, Mus musculus
caaagtttcagatgccagaatgtataagtgtctcagtgtccacagataggcaaagggcaaaggggtccgtcacctgatggcttcttttgcttccgagtcattgcatagtctcatcattgctcacagatgcttaggggccacaccctggtgaagtacgcgatctccagagcac

SEQ ID NO: 1005 - DNA, 172 bp, Mus musculus; identical to SEQ ID NO: 1004

SEQ ID NO: 1006 - DNA, 344 bp, Mus musculus
gtagttgcccctcatcacatgcttgtagagctccttctgccagtcctccagcttgccccactcttgggggacctcgcccttgctgcctgggggaagccgaagaatccagaagttccggttgcgtagcagattctccacattttccagccgccgctgcagcagcccatattcctgcagcagggttcccagcacggcccacttgccctccagctggttgctgaactccacagctgtcttctcacagtcagccagcttcttctctgccatcccagttcgaccttctagagaaagcagtcgagcagcctgtgattcaatcttcctctccatagcctgaattgtagctg

SEQ ID NO: 1007 - DNA, 344 bp, Mus musculus; identical to SEQ ID NO: 1006

SEQ ID NO: 1008 - DNA, 223 bp, Mus musculus
  misc_feature (133)..(133): n is a, c, g, or t
  misc_feature (168)..(168): n is a, c, g, or t
  misc_feature (170)..(170): n is a, c, g, or t
gaccttagcttagtacaatcattgtccagggaaatggccaaaatggctctgctcaccccgtgctctttttctgactcagttttcaggtctcagtagtggctgcccaaagctattaattcagcggctcgaggcnacctcttcctccccgtggtggtttcaggatccccntngcccccccccccccaaatccttgcactttattctcctgggtggttccaggccg

SEQ ID NO: 1009 - DNA, 223 bp, Mus musculus; identical to SEQ ID NO: 1008
  misc_feature (133)..(133): n is a, c, g, or t
  misc_feature (168)..(168): n is a, c, g, or t
  misc_feature (170)..(170): n is a, c, g, or t

SEQ ID NO: 1010 - DNA, 190 bp, Mus musculus
cagtaattcatcattgctaatgtgtttgaaaatgagatgtattttcatataatttgtaaaatccccatataagcagttctgagtaacctgtttgtaagttctaaattttaggtggcataggatgtcataatattttctgttagaatatgaaatgttttctttttgcatgcagcttgacattaaagatttt

SEQ ID NO: 1011 - DNA, 190 bp, Mus musculus; identical to SEQ ID NO: 1010

SEQ ID NO: 1012 - DNA, 435 bp, Mus musculus
agattgctaggtaggtagacacacagacacacacacagacacacacacacacagacacacgcacgcacgcacatctggagagggcatagttctccagagcgtcaaggtttccctaaagttttcaaaagctgctgtcacaatttcattccgaggccatcttgcccctcccccttcactctgccttcctgagttggccccactctgcacgggagggagggcccaccttagactgctggggagaggccacagggctgggggccaggtccggccagctgtgcccatcgcctgggagaaggccagctcaccaactgagctctggactggggactaccgctgaccaggagggaagcctggagccgcacccgactcagccactctgcgtcacattcgtcctgtacctaggaccggaggaaagacgtgactgctctaaccgga

SEQ ID NO: 1013 - DNA, 435 bp, Mus musculus; identical to SEQ ID NO: 1012

SEQ ID NO: 1014 - DNA, 400 bp, Mus musculus
  misc_feature (50)..(50): n is a, c, g, or t
  misc_feature (211)..(226): n is a, c, g, or t
agccagaccttacactcagcttcagaccacctcactcaagggccaacccntaatcacaacccagatccttttgggccatgtgtgtccccattaccaccagtaagggtcatggcttgtgagccacctgccttggtggagctggtaggtgctgtgagggaggtgggtgaccagctgcagagactgacctgggtcctggagcaggaccggcagnnnnnnnnnnnnnnnncactgggcctagcccagttggtagaggctgctcaggggttggggcagctgagtgagactgtaaagaggctagcagaggtggcctggccccccagcactcctgtgcccatgaccaccaccacagaggaggaggagaggcctctgaggggagatgtgtgacccactctgaaattca

SEQ ID NO: 1015 - DNA, 400 bp, Mus musculus; identical to SEQ ID NO: 1014
  misc_feature (50)..(50): n is a, c, g, or t
  misc_feature (211)..(226): n is a, c, g, or t

SEQ ID NO: 1016 - DNA, 527 bp, Mus musculus
  misc_feature (30)..(30): n is a, c, g, or t
  misc_feature (216)..(217): n is a, c, g, or t
  misc_feature (221)..(221): n is a, c, g, or t
  misc_feature (368)..(368): n is a, c, g, or t
  misc_feature (372)..(372): n is a, c, g, or t
  misc_feature (377)..(377): n is a, c, g, or t
  misc_feature (379)..(447): n is a, c, g, or t
  misc_feature (462)..(462): n is a, c, g, or t
  misc_feature (486)..(487): n is a, c, g, or t
gcatgttctcccttctgaaataagttttcngaatattcaaagggtatttgctctcttgtcataggtgaaggtggtttctatggcccagaggcaagccactagtactccccacagcccagctttcaaggccccactggcatgctcttgaacaccaagcccgtttccccacacccaggaaagagcaatttatgtctcttgagggtagaaccagcgtannctcnatctgaatcaagttggtttttgtgtggattttaaagactaaagatttcctactttctttaaatatcctcccccccctttttttttactataaaaggtattttgtatatagatgtcttttaaaagtgaaaatactacagcaatacaanatgntattntnnnnnnnnnnnnnnnnnnnnnnnnnnnnnnnnnnnnnnnnnnnnnnnnnnnnnnnnnnnnnnnnnnnnncaagtacaagtaacntgccctgtgcttcccagagcttgnntgcagaaatgtggagttaatacaacaggaacctttttgtg

SEQ ID NO: 1017 - DNA, 527 bp, Mus musculus; identical to SEQ ID NO: 1016
  misc_feature (30)..(30): n is a, c, g, or t
  misc_feature (216)..(217): n is a, c, g, or t
  misc_feature (221)..(221): n is a, c, g, or t
  misc_feature (368)..(368): n is a, c, g, or t
  misc_feature (372)..(372): n is a, c, g, or t
  misc_feature (377)..(377): n is a, c, g, or t
  misc_feature (379)..(447): n is a, c, g, or t
  misc_feature (462)..(462): n is a, c, g, or t
  misc_feature (486)..(487): n is a, c, g, or t

SEQ ID NO: 1018 - DNA, 349 bp, Mus musculus
  misc_feature (322)..(322): n is a, c, g, or t
cttccaaacagtgttgatgagaatttgtcatcagtggaaattgaactagaacacccttccggagaacacccagcgtttcaccacagcccttctggcccaatttgagatcagcgtgggtgacagacagattccagcctctgctgccaccatgaacagccgttgcttccagcagctggatgagggctatgatgaggaatacggcggcttcgccgaggcccccaagtttcccacacctgtgatcctgaacttcctgttctcctattggcagcagaggctggaatctgtctgtcacccacgctgatctcagatcgggccagaaggnctgtggtgacgcgctggctgttctcca

SEQ ID NO: 1019 - DNA, 349 bp, Mus musculus; identical to SEQ ID NO: 1018
  misc_feature (322)..(322): n is a, c, g, or t

SEQ ID NO: 1020 - DNA, 129 bp, Mus musculus
gatgtgcacatatctgccaccacattccatatgtgttgagtagttaactcatctagttaataacgtttgtgtccatgtgagagattcggtgagttcatcctcagctctcttgggctgcagtttatattg

SEQ ID NO: 1021 - DNA, 129 bp, Mus musculus; identical to SEQ ID NO: 1020

SEQ ID NO: 1022 - DNA, 331 bp, Mus musculus
  misc_feature (94)..(108): n is a, c, g, or t
tttcgagatcagtcaacctccgcatgcctgccaccagctctcttaccaccaccgctgctgccgccaccaccacaacctgtcaccaccgtggccnnnnnnnnnnnnnnntcaccctctgtctacactatgccccgggtctttggccctttccctccactgtctggcaagccgatggagaaactggatatttcaagttctgaagtgaaactaaactggagtggtctttcatcaacgtcaaagagccacatggttgatctgacccccttggttctcaatcccggaggcttccatttctcatatttggcaggaagcagtgcacacaagctccatt

SEQ ID NO: 1023 - DNA, 331 bp, Mus musculus; identical to SEQ ID NO: 1022
  misc_feature (94)..(108): n is a, c, g, or t

SEQ ID NO: 1024 - DNA, 543 bp, Mus musculus
  misc_feature (31)..(33): n is a, c, g, or t
  misc_feature (48)..(48): n is a, c, g, or t
  misc_feature (79)..(80): n is a, c, g, or t
  misc_feature (312)..(312): n is a, c, g, or t
  misc_feature (314)..(314): n is a, c, g, or t
  misc_feature (318)..(318): n is a, c, g, or t
  misc_feature (323)..(323): n is a, c, g, or t
  misc_feature (330)..(330): n is a, c, g, or t
  misc_feature (333)..(333): n is a, c, g, or t
  misc_feature (336)..(336): n is a, c, g, or t
  misc_feature (345)..(346): n is a, c, g, or t
  misc_feature (378)..(378): n is a, c, g, or t
  misc_feature (393)..(393): n is a, c, g, or t
  misc_feature (403)..(403): n is a, c, g, or t
  misc_feature (411)..(411): n is a, c, g, or t
  misc_feature (431)..(431): n is a, c, g, or t
  misc_feature (437)..(437): n is a, c, g, or t
  misc_feature (507)..(507): n is a, c, g, or t
  misc_feature (518)..(518): n is a, c, g, or t
cacttgtttggttgtggcctacggtttggannnttaccaaactcgagnttacccgtccaagcagtttgatgtcctgaannatgactacgactatgtgctcatcagcagtgtcctttttggcctggtttttgccaccatgatcacaaagaggctggcacaggtgaaactcctcaatcgagcctggcggtaaaatgggagcaccgtgccagagtggagcctcgggaagagggacagctaaggagatggccgtggactgttggatccctgaggttgggctgggctcttgtctcacttacgtctgggagaagaagntncacnttcanggagaantgnttngggaacacnntgacgaacagttcttgtggtcagatacccacntcagcgtggaggagntccgtgcatntgatccantccctgttccctttatgtgntcattngtggatgctgtgagccttttgtttttgttttctttttgtttttttgttttttttcctttcatgagacctntggtttctttnttctgagactgtttaaattgacctt

SEQ ID NO: 1025 - DNA, 1086 bp, Mus musculus
  misc_feature (31)..(33): n is a, c, g, or t
  misc_feature (48)..(48): n is a, c, g, or t
  misc_feature (79)..(80): n is a, c, g, or t
  misc_feature (312)..(312): n is a, c, g, or t
  misc_feature (314)..(314): n is a, c, g, or t
  misc_feature (318)..(318): n is a, c, g, or t
  misc_feature (323)..(323): n is a, c, g, or t
  misc_feature (330)..(330): n is a, c, g, or t
  misc_feature (333)..(333): n is a, c, g, or t
  misc_feature (336)..(336): n is a, c, g, or t
  misc_feature (345)..(346): n is a, c, g, or t
  misc_feature (378)..(378): n is a, c, g, or t
  misc_feature (393)..(393): n is a, c, g, or t
  misc_feature (403)..(403): n is a, c, g, or t
  misc_feature (411)..(411): n is a, c, g, or t
  misc_feature (431)..(431): n is a, c, g, or t
  misc_feature (437)..(437): n is a, c, g, or t
  misc_feature (507)..(507): n is a, c, g, or t
  misc_feature (518)..(518): n is a, c, g, or t
  misc_feature (574)..(576): n is a, c, g, or t
  misc_feature (591)..(591): n is a, c, g, or t
  misc_feature (622)..(623): n is a, c, g, or t
  misc_feature (855)..(855): n is a, c, g, or t
  misc_feature (857)..(857): n is a, c, g, or t
  misc_feature (861)..(861): n is a, c, g, or t
  misc_feature (866)..(866): n is a, c, g, or t
  misc_feature (873)..(873): n is a, c, g, or t
  misc_feature (876)..(876): n is a, c, g, or t
  misc_feature (879)..(879): n is a, c, g, or t
  misc_feature (888)..(889): n is a, c, g, or t
  misc_feature (921)..(921): n is a, c, g, or t
  misc_feature (936)..(936): n is a, c, g, or t
  misc_feature (946)..(946): n is a, c, g, or t
  misc_feature (954)..(954): n is a, c, g, or t
  misc_feature (974)..(974): n is a, c, g, or t
  misc_feature (980)..(980): n is a, c, g, or t
  misc_feature (1050)..(1050): n is a, c, g, or t
  misc_feature (1061)..(1061): n is a, c, g, or t
cacttgtttggttgtggcctacggtttggannnttaccaaactcgagnttacccgtccaagcagtttgatgtcctgaannatgactacgactatgtgctcatcagcagtgtcctttttggcctggtttttgccaccatgatcacaaagaggctggcacaggtgaaactcctcaatcgagcctggcggtaaaatgggagcaccgtgccagagtggagcctcgggaagagggacagctaaggagatggccgtggactgttggatccctgaggttgggctgggctcttgtctcacttacgtctgggagaagaagntncacnttcanggagaantgnttngggaacacnntgacgaacagttcttgtggtcagatacccacntcagcgtggaggagntccgtgcatntgatccantccctgttccctttatgtgntcattngtggatgctgtgagccttttgtttttgttttctttttgtttttttgttttttttcctttcatgagacctntggtttctttnttctgagactgtttaaattgaccttcacttgtttggttgtggcctacggtttggannnttaccaaactcgagnttacccgtccaagcagtttgatgtcctgaannatgactacgactatgtgctcatcagcagtgtcctttttggcctggtttttgccaccatgatcacaaagaggctggcacaggtgaaactcctcaatcgagcctggcggtaaaatgggagcaccgtgccagagtggagcctcgggaagagggacagctaaggagatggccgtggactgttggatccctgaggttgggctgggctcttgtctcacttacgtctgggagaagaagntncacnttcanggagaantgnttngggaacacnntgacgaacagttcttgtggtcagatacccacntcagcgtggaggagntccgtgcatntgatccantccctgttccctttatgtgntcattngtggatgctgtgagccttttgtttttgttttctttttgtttttttgttttttttcctttcatgagacctntggtttctttnttctgagactgtttaaattgacctt

SEQ ID NO: 1026 - DNA, 525 bp, Mus musculus
  misc_feature (26)..(26): n is a, c, g, or t
  misc_feature (133)..(133): n is a, c, g, or t
  misc_feature (135)..(135): n is a, c, g, or t
  misc_feature (330)..(330): n is a, c, g, or t
  misc_feature (354)..(368): n is a, c, g, or t
  misc_feature (377)..(377): n is a, c, g, or t
  misc_feature (392)..(392): n is a, c, g, or t
  misc_feature (394)..(394): n is a, c, g, or t
  misc_feature (431)..(431): n is a, c, g, or t
  misc_feature (445)..(445): n is a, c, g, or t
  misc_feature (463)..(463): n is a, c, g, or t
  misc_feature (465)..(465): n is a, c, g, or t
aaggaccagaggtgtctcgctgtctnctgtaccctctctgagtataacatcttgcatggagatgatcataccatctccagtgtgctttactctgatcagctgccctgaagggggctgcaggctcttagcctgnanaaaaccaccttgagttagcactgggtcacttccttaggaaaacatatttaaatattgcccagagttcctctgtagtcagggtggtttgtctaccagagtcccagagcttgaatcagggtccagaatcctaggaacaggatgttctttcctgttctccccagcgtgctgggtttgtacgtctggtgcttttgagtntcctgcctgtgaccctagcttggnnnnnnnnnnnnnnncccagagcntggaggaccaatgantntcactgttcataaggcgggcctgacacgtggctaccntcatcagaactgtntcagctgctacactgagntntggtgcagattttaaatgcctatttttatataccatccccagaggccatatttggtgcca

SEQ ID NO: 1027 - DNA, 525 bp, Mus musculus; identical to SEQ ID NO: 1026
  misc_feature (26)..(26): n is a, c, g, or t
  misc_feature (133)..(133): n is a, c, g, or t
  misc_feature (135)..(135): n is a, c, g, or t
  misc_feature (330)..(330): n is a, c, g, or t
  misc_feature (354)..(368): n is a, c, g, or t
  misc_feature (377)..(377): n is a, c, g, or t
  misc_feature (392)..(392): n is a, c, g, or t
  misc_feature (394)..(394): n is a, c, g, or t
  misc_feature (431)..(431): n is a, c, g, or t
  misc_feature (445)..(445): n is a, c, g, or t
  misc_feature (463)..(463): n is a, c, g, or t
  misc_feature (465)..(465): n is a, c, g, or t

SEQ ID NO: 1028 - DNA, 439 bp, Mus musculus
  misc_feature (37)..(37): n is a, c, g, or t
  misc_feature (42)..(42): n is a, c, g, or t
  misc_feature (45)..(51): n is a, c, g, or t
  misc_feature (55)..(55): n is a, c, g, or t
aacgtgagactgtctgctccacgccaggttggttttnttgtnttnnnnnnnaagngagaatacttaatttttactttaaataaaaactacttctgacggaaaaaaacttttaagaagactatttaataatcccttcgggtggctttttaaataaatacaaccctttggagttgctatacggtacttttttataaagagtcataaaagtgactgtcctgggctagtgagatgactagcaggtgagattgcttacctcgcaggcccaagagctgcatttaaccctgagaggagaacatggactcctgggggctgtcctctgcctttcacatgtgtgctgtgctacatgtacacacacacacacacacacacacacacacgatggaaggaaattcgatttttaaagatgactgtgtcctttgccctgtgagctgtcattatt

SEQ ID NO: 1029 - DNA, 439 bp, Mus musculus; identical to SEQ ID NO: 1028
  misc_feature (37)..(37): n is a, c, g, or t
  misc_feature (42)..(42): n is a, c, g, or t
  misc_feature (45)..(51): n is a, c, g, or t
  misc_feature (55)..(55): n is a, c, g, or t

SEQ ID NO: 1030 - DNA, 435 bp, Mus musculus
  misc_feature (214)..(214): n is a, c, g, or t
  misc_feature (268)..(268): n is a, c, g, or t
  misc_feature (390)..(390): n is a, c, g, or t
tccacactggccaggaaaagccttccacgaggagcggtcagactgcaaaatccaatgtgcttccttccccgccacggtcctctctctctctcggggagccgatggtccccgtccctgaaccccctagcccgcatccccaccacagaatctaagacctttcatctggccgagccaggggcaaaggggatcctaagcaaatgccttccgtggacanacaggccccacggcctaaagggctcccagggcaaactttcccccaacacttganggggggtgggggggatggcggctacacattccactaagtgcagcactcgcacccacaacccggaaggaaggctcttaagcgattctcagagggtggtgactgcccatcatcgtcagacggtntcgtggtttggaatgttaattatcgcagaggacctggtagaggta

SEQ ID NO: 1031 - DNA, 435 bp, Mus musculus; identical to SEQ ID NO: 1030
  misc_feature (214)..(214): n is a, c, g, or t
  misc_feature (268)..(268): n is a, c, g, or t
  misc_feature (390)..(390): n is a, c, g, or t

SEQ ID NO: 1032 - DNA, 575 bp, Mus musculus
  misc_feature (34)..(34): n is a, c, g, or t
  misc_feature (39)..(39): n is a, c, g, or t
  misc_feature (50)..(50): n is a, c, g, or t
  misc_feature (67)..(67): n is a, c, g, or t
  misc_feature (76)..(76): n is a, c, g, or t
  misc_feature (96)..(96): n is a, c, g, or t
  misc_feature (109)..(109): n is a, c, g, or t
  misc_feature (135)..(136): n is a, c, g, or t
  misc_feature (138)..(138): n is a, c, g, or t
  misc_feature (140)..(146): n is a, c, g, or t
  misc_feature (148)..(154): n is a, c, g, or t
  misc_feature (156)..(156): n is a, c, g, or t
  misc_feature (158)..(158): n is a, c, g, or t
  misc_feature (209)..(209): n is a, c, g, or t
  misc_feature (215)..(215): n is a, c, g, or t
ctgtgcgggtttgtacatgtatctgtgagttganaggantcagaaagganttacaaacagcaggganaagcttgangttgttgctggaaataaacntcaagtcccctanaaaaacagtgcatactcttcttagcnntnannnnnnncnnnnnnncngncctaagtaactctcttattcttatgcacgcttggctgtaggagccgctggnctgganacgctcaaagcagccacagatatacatgaatccggctccgagaaagcgtggggtcacagcaggggtgcccggccggtcgaggggcgccagggaccccttctctagtcctcccggctggaggtctcaccccgattacttcgcccttagttgcagtgacctgaggcatctcaagtccggaaaaaattagctccgggagacccacagcaccttcaggttttcccttcctcttctgttctttgggtaggattcacagcagaagagttctgaccctccgtggtgtgagtccagtgtctctgatcgtctgtgggctctgtggctggggcgtctccataaatgcctcgaaaactttgctcctatttg

SEQ ID NO: 1033 - DNA, 575 bp, Mus musculus; identical to SEQ ID NO: 1032
  misc_feature (34)..(34): n is a, c, g, or t
  misc_feature (39)..(39): n is a, c, g, or t
  misc_feature (50)..(50): n is a, c, g, or t
  misc_feature (67)..(67): n is a, c, g, or t
  misc_feature (76)..(76): n is a, c, g, or t
  misc_feature (96)..(96): n is a, c, g, or t
  misc_feature (109)..(109): n is a, c, g, or t
  misc_feature (135)..(136): n is a, c, g, or t
  misc_feature (138)..(138): n is a, c, g, or t
  misc_feature (140)..(146): n is a, c, g, or t
  misc_feature (148)..(154): n is a, c, g, or t
  misc_feature (156)..(156): n is a, c, g, or t
  misc_feature (158)..(158): n is a, c, g, or t
  misc_feature (209)..(209): n is a, c, g, or t
  misc_feature (215)..(215): n is a, c, g, or t

SEQ ID NO: 1034 - DNA, 589 bp, Mus musculus
  misc_feature (41)..(96): n is a, c, g, or t
  misc_feature (318)..(332): n is a, c, g, or t
  misc_feature (380)..(380): n is a, c, g, or t
  misc_feature (387)..(387): n is a, c, g, or t
  misc_feature (402)..(423): n is a, c, g, or t
  misc_feature (481)..(481): n is a, c, g, or t
gctacttcagatgcaaagtaaaacccaagctctcacctcannnnnnnnnnnnnnnnnnnnnnnnnnnnnnnnnnnnnnnnnnnnnnnnnnnnnnnnttacttgtaaacggaaatgctgaagacactcagctttctttacagaaaatcaaggtttcctgatgactgggcacatgaggtgagctgacagtcttggttcagggtgatcggattgtgtagactgacagtctgtgtactgctggctaagtgtgatagcatctgcagttctctccctcccggtagttactgaactctttaaaactggtattgtgacgttacaannnnnnnnnnnnnnnattttataaacctttacagtgcaatatgtgttacttttctgaggcaanccaaagntatatttctcaaggnnnnnnnnnnnnnnnnnnnnnngatggaggattttttttatacatttgtaataggtagagatgaaacagattgcagtttnttttttgttatttttttttttttaaattgtaaaccatgtaccaggtttctggtcaagattgtgtaggataagttaaacataattgcattctattaaccaatatgagtg

SEQ ID NO: 1035 - DNA, 589 bp, Mus musculus; identical to SEQ ID NO: 1034
  misc_feature (41)..(96): n is a, c, g, or t
  misc_feature (318)..(332): n is a, c, g, or t
  misc_feature (380)..(380): n is a, c, g, or t
  misc_feature (387)..(387): n is a, c, g, or t
  misc_feature (402)..(423): n is a, c, g, or t
  misc_feature (481)..(481): n is a, c, g, or t

SEQ ID NO: 1036 - DNA, 266 bp, Mus musculus
  misc_feature (215)..(215): n is a, c, g, or t
agtatttgtgacaggcagcctgcttgccctgtgacgttttgattcacagtggggattagcatgtagggagagcctcccatgctcgggtgccttgtgcatacttctctcctacagtcctgggaggaaagcagacgtgagcgtcctcaggtttgtggtgagagcttgaggaactgggcagaggggtacacagcagtgagtgaagaggagcggtcacngaggactgactccagtcagatgaagccacctgtcactcgtcagacttcagt

SEQ ID NO: 1037 - DNA, 266 bp, Mus musculus; identical to SEQ ID NO: 1036
  misc_feature (215)..(215): n is a, c, g, or t

SEQ ID NO: 1038 - DNA, 190 bp, Mus musculus
aaatggctcccgtggccaatttcatccgatagcggggccgggtgtccatcacagagattgcccaggccagaaactccctaatttcctggggccaggacctccctgcccaggattaagcctgaccccagtccttccttgagtgtatcctgtggccaaaatgtgtattcatccttcccaaaagccgtcttgg

SEQ ID NO: 1039 - DNA, 190 bp, Mus musculus; identical to SEQ ID NO: 1038

SEQ ID NO: 1040 - DNA, 277 bp, Mus musculus
  misc_feature (70)..(70): n is a, c, g, or t
  misc_feature (134)..(149): n is a, c, g, or t
tcatgccctcatacaccctagaggagggacaactgctaccttgtgggactgcacagtttgggtattcttnatgaccaggcagatgccttaaataaacaagaaatgtcttaattatacaccccaagtaaatacgnnnnnnnnnnnnnnnnggatgtatttatataattatttgttaggttgtaaaaaaaaagtgtaaaatatgtatatatccaaagatatacaatgtgtacattacttgtaaaaagtttagaggctaccctgtaagaacaaatataag

SEQ ID NO: 1041 - DNA, 277 bp, Mus musculus; identical to SEQ ID NO: 1040
  misc_feature (70)..(70): n is a, c, g, or t
  misc_feature (134)..(149): n is a, c, g, or t

SEQ ID NO: 1042 - DNA, 335 bp, Mus musculus
cccagcagcagtgaagatgcagactgataccacctccaccgctgagcagtgaccttcctcactttctcttgtcccagcttctcccctgggggcctgagagaccctcaccttccttctgcccatcttccatgttgtaaaggaacagccccagtgcactgggggaggggagggagtgaggggcagtggtgcccttcctgcagaagagacatgcagcagtagcgctggcgccatctgcaggagctggcgggctggccttctggaccctggcttctccccactgtaacgcctgttacacacaaactgttgtgggttcctgccaggcttgaagaaaatga

SEQ ID NO: 1043 - DNA, 335 bp, Mus musculus; identical to SEQ ID NO: 1042

SEQ ID NO: 1044 - DNA, 564 bp, Mus musculus
  misc_feature (48)..(48): n is a, c, g, or t
  misc_feature (212)..(212): n is a, c, g, or t
  misc_feature (423)..(423): n is a, c, g, or t
acttgtttctagaggtctagcaaggctacaggggaaagtgtgtctgcntccaggtagagtctgccatctaggttcttttgtgctttttaaacaagactggatgtattcagtactaattggaagtttattttcatagtttcatggaagagtttctttactaatagcatatagtatcactatgtactatcttggtttaaagaaaaggattaaanaattaaatgataaggaaaatattcataaatacaaacttgtttgttctagaccttgaaatagtctgaattttggtaatcataaaaacagttgttctaaataacacaattttcatttgtttgtagttcatgtaaatgtagccaaattactgtattgggattgtaatgtctcaaatgttaaagtaaatgtccaggagatgttctgttgttccancttgattaaaggtacttaagttttactgttctcaacatttgatcttgagaaaagcttggttttataaaatatgaattgtattctttttaaacatgcttttaaaaaaccaaatgtattgttaatgcctagataaaggatgcc

SEQ ID NO: 1045 - DNA, 564 bp, Mus musculus; identical to SEQ ID NO: 1044
  misc_feature (48)..(48): n is a, c, g, or t
  misc_feature (212)..(212): n is a, c, g, or t
  misc_feature (423)..(423): n is a, c, g, or t

SEQ ID NO: 1046 - DNA, 529 bp, Mus musculus
  misc_feature (192)..(192): n is a, c, g, or t
  misc_feature (196)..(196): n is a, c, g, or t
  misc_feature (209)..(209): n is a, c, g, or t
  misc_feature (211)..(211): n is a, c, g, or t
  misc_feature (214)..(214): n is a, c, g, or t
  misc_feature (220)..(220): n is a, c, g, or t
  misc_feature (224)..(224): n is a, c, g, or t
  misc_feature (226)..(226): n is a, c, g, or t
  misc_feature (229)..(229): n is a, c, g, or t
  misc_feature (231)..(231): n is a, c, g, or t
  misc_feature (282)..(282): n is a, c, g, or t
  misc_feature (284)..(311): n is a, c, g, or t
  misc_feature (345)..(345): n is a, c, g, or t
  misc_feature (347)..(348): n is a, c, g, or t
  misc_feature (357)..(358): n is a, c, g, or t
  misc_feature (361)..(361): n is a, c, g, or t
  misc_feature (366)..(366): n is a, c, g, or t
  misc_feature (370)..(370): n is a, c, g, or t
  misc_feature (372)..(372): n is a, c, g, or t
  misc_feature (405)..(405): n is a, c, g, or t
  misc_feature (463)..(463): n is a, c, g, or t
cttcttgaactgaaagaatgtacgcgccagggggacaccgagctgcagcagctggaggtggagctccagaggaccagcaaggaggacacctgtgtgcaggctaggctacgtcagctcatcacagagctgcaggagctcagggagatggaggaagagctccagcgccaggagagggatgtagatgaggacaanaccntcaccatcccctntncantgtatntggntnatntntatcaccaaattagtaaaatacagtgggattatgaatgcgagccagggatnannnnnnnnnnnnnnnnnnnnnnnnnnnnggcccagcccatccacttggacagtgcacagctntnnccgaagttnntcngtgantacntntggagcctggtggacaccacgtgggagccaganccttgacctcataccttgcacagaactggggttgagggagccaaggaggggatcactntaaaattaaatgtctgtatgtgagtgcgttcattgatttatctacttgctttgagacagcatggag

SEQ ID NO: 1047 - DNA, 529 bp, Mus musculus; identical to SEQ ID NO: 1046
  misc_feature (192)..(192): n is a, c, g, or t
  misc_feature (196)..(196): n is a, c, g, or t
  misc_feature (209)..(209): n is a, c, g, or t
  misc_feature (211)..(211): n is a, c, g, or t
  misc_feature (214)..(214): n is a, c, g, or t
  misc_feature (220)..(220): n is a, c, g, or t
  misc_feature (224)..(224): n is a, c, g, or t
  misc_feature (226)..(226): n is a, c, g, or t
  misc_feature (229)..(229): n is a, c, g, or t
  misc_feature (231)..(231): n is a, c, g, or t
  misc_feature (282)..(282): n is a, c, g, or t
  misc_feature (284)..(311): n is a, c, g, or t
  misc_feature (345)..(345): n is a, c, g, or t
  misc_feature (347)..(348): n is a, c, g, or t
  misc_feature (357)..(358): n is a, c, g, or t
  misc_feature (361)..(361): n is a, c, g, or t
  misc_feature (366)..(366): n is a, c, g, or t
  misc_feature (370)..(370): n is a, c, g, or t
  misc_feature (372)..(372): n is a, c, g, or t
  misc_feature (405)..(405): n is a, c, g, or t
  misc_feature (463)..(463): n is a, c, g, or t

SEQ ID NO: 1048 - DNA, 432 bp, Mus musculus
  misc_feature (212)..(212): n is a, c, g, or t
  misc_feature (215)..(215): n is a, c, g, or t
  misc_feature (219)..(219): n is a, c, g, or t
  misc_feature (232)..(233): n is a, c, g, or t
  misc_feature (237)..(237): n is a, c, g, or t
  misc_feature (243)..(243): n is a, c, g, or t
  misc_feature (254)..(254): n is a, c, g, or t
  misc_feature (259)..(259): n is a, c, g, or t
  misc_feature (263)..(263): n is a, c, g, or t
  misc_feature (309)..(309): n is a, c, g, or t
  misc_feature (326)..(326): n is a, c, g, or t
  misc_feature (355)..(355): n is a, c, g, or t
  misc_feature (357)..(357): n is a, c, g, or t
  misc_feature (375)..(375): n is a, c, g, or t
agcgtgatcttggagcctccggtcctagtgggccacaagtacactctgcgatgctatgtgacacacgtgttcccagtgggattcttggtggtgagcctgagaagaggtggccgagtgatttatcatgaaagcctggagcgcttcaccggttcagatttggctaatgtcactttgacctacgtgatgcgggccggactcaacgacctctggcngcnactnacctgccatgcgnncctnaatctngacgggctagnggtgngcancagctcggcacctgttatgttgacagtcctcgctttaagcccagcntctatagccttggcctntacctccatcgcaaccctggtggggatcntnctggctgtgggggctgtntacgtgcgcaagtacctggctgtgcagacttagttatagatctgttttcgatgcctg

SEQ ID NO: 1049 - DNA, 432 bp, Mus musculus; identical to SEQ ID NO: 1048
  misc_feature (212)..(212): n is a, c, g, or t
  misc_feature (215)..(215): n is a, c, g, or t
  misc_feature (219)..(219): n is a, c, g, or t
  misc_feature (232)..(233): n is a, c, g, or t
  misc_feature (237)..(237): n is a, c, g, or t
  misc_feature (243)..(243): n is a, c, g, or t
  misc_feature (254)..(254): n is a, c, g, or t
  misc_feature (259)..(259): n is a, c, g, or t
  misc_feature (263)..(263): n is a, c, g, or t
  misc_feature (309)..(309): n is a, c, g, or t
  misc_feature (326)..(326): n is a, c, g, or t
  misc_feature (355)..(355): n is a, c, g, or t
  misc_feature (357)..(357): n is a, c, g, or t
  misc_feature (375)..(375): n is a, c, g, or t

SEQ ID NO: 1050 - DNA, 297 bp, Mus musculus
  misc_feature (56)..(56): n is a, c, g, or t
  misc_feature (191)..(205): n is a, c, g, or t
  misc_feature (218)..(218): n is a, c, g, or t
ctcacagggccgagtcggagtcgctggagtccaggctgttcctcagtttgcagctnccgagcggctccctctgcagcgacaggctctgcgtgctgcggcgcaggcactccaagctctgcaggaacgacttcttggccttctcctcctccatcggggacaccccctcctcctccacctcctggatctcgtcnnnnnnnnnnnnnnncgtcttgaagcgngactggcgtggccgccgcagccggcccttgcccttgggcagcttggcgggccgcaccggctgcgggaactcatcggtca

SEQ ID NO: 1051 - DNA, 297 bp, Mus musculus; identical to SEQ ID NO: 1050
  misc_feature (56)..(56): n is a, c, g, or t
  misc_feature (191)..(205): n is a, c, g, or t
  misc_feature (218)..(218): n is a, c, g, or t

SEQ ID NO: 1052 - DNA, 470 bp, Mus musculus
  misc_feature (236)..(236): n is a, c, g, or t
  misc_feature (280)..(296): n is a, c, g, or t
  misc_feature (323)..(337): n is a, c, g, or t
cctgttttctgacgtgtgccttcccccctaaggagcagtgacagccgctctattagatttctattttcttttctgaaaaatgtcaatttttcagagaggagaaaatagagcattctgtccatgtttttgtttccaagaacaagtataaacttaagctctgtagaactgaaattctttcaagtcctttcgatcattttgatcatgcccaaaacaaccaaactggacaacatgctttncagttcagttgaagagcatttgcctttgacagtaggcgtgcacnnnnnnnnnnnnnnnnnataaacaggtatattatctgcttcccnnnnnnnnnnnnnnngtcaaaataactgagaatcatacagtttcaacaaaccttgttccttaccattgtcatgaacccccatcagagccatcttctgtttgttaatgggaagaggcatgtgggatttatacaggctcacctgttggag

SEQ ID NO: 1053 - DNA, 470 bp, Mus musculus; identical to SEQ ID NO: 1052
  misc_feature (236)..(236): n is a, c, g, or t
  misc_feature (280)..(296): n is a, c, g, or t
  misc_feature (323)..(337): n is a, c, g, or t

SEQ ID NO: 1054 - DNA, 471 bp, Mus musculus
gtttgattatatacccctattaaggttggcccccggcacaattgggcggggagtctctttccgtgtttccccaaagaccagccaaagtttatttggtttgtacaagcagacctaagccctggtactaagttgaacttgcagggctttttgtggtcacctcaaaatgatagatggtggccccagatccatttcacatttttggactctgggttctgccatctcccatgtgggtttaggctactcaagcatctgtgcacagcaccttcccactctgcaggagtactgaatctggaccagaaagccatgcatcctggctgggaggtcttaagttcagaacccttgggcctcactcaccactgcagtcatgggcacagacccttatggtccccacactcagcatctccctacctcctgcacctctggctcttacccggttcttgatgctcctcttccagcctcctagagttctag

SEQ ID NO: 1055 - DNA, 471 bp, Mus musculus; identical to SEQ ID NO: 1054

SEQ ID NO: 1056 - DNA, 166 bp, Mus musculus
  misc_feature (34)..(34): n is a, c, g, or t
tactgactgtatggtgaggcagactttttttttntccccctatgtggtatcaaataactgcaagagacagaaaaaaaaaaaagcagtttgaatgttttgtgtgtgaggagtataccaagggatgagttgaccaccaatcatttcctgaagggtgtctgcaccttag

SEQ ID NO: 1057 - DNA, 166 bp, Mus musculus; identical to SEQ ID NO: 1056
  misc_feature (34)..(34): n is a, c, g, or t

SEQ ID NO: 1058 - DNA, 207 bp, Mus musculus
tgctgggaggtatcacccttctggcggcctcggtctcctgcagccggaccgagaaccttgcaccgggacgcaacaacagtaaaggaagaagtcttattggcagattagaaacccagcctccaatcactgggaaaggggttccggtagaaccaggcttttccatcgatgagttctctgcgtccatcctcaccgggaagctgaccacgg

SEQ ID NO: 1059 - DNA, 207 bp, Mus musculus; identical to SEQ ID NO: 1058

SEQ ID NO: 1060 - DNA, 557 bp, Mus musculus
  misc_feature (121)..(135): n is a, c, g, or t
  misc_feature (138)..(138): n is a, c, g, or t
  misc_feature (162)..(162): n is a, c, g, or t
  misc_feature (191)..(191): n is a, c, g, or t
  misc_feature (196)..(196): n is a, c, g, or t
  misc_feature (206)..(206): n is a, c, g, or t
  misc_feature (208)..(208): n is a, c, g, or t
  misc_feature (231)..(231): n is a, c, g, or t
  misc_feature (240)..(240): n is a, c, g, or t
  misc_feature (252)..(252): n is a, c, g, or t
  misc_feature (257)..(257): n is a, c, g, or t
  misc_feature (260)..(260): n is a, c, g, or t
  misc_feature (270)..(305): n is a, c, g, or t
  misc_feature (310)..(310): n is a, c, g, or t
  misc_feature (318)..(318): n is a, c, g, or t
  misc_feature (321)..(321): n is a, c, g, or t
  misc_feature (333)..(333): n is a, c, g, or t
  misc_feature (338)..(338): n is a, c, g, or t
  misc_feature (392)..(392): n is a, c, g, or t
  misc_feature (457)..(457): n is a, c, g, or t
  misc_feature (476)..(476): n is a, c, g, or t
  misc_feature (478)..(478): n is a, c, g, or t
tatggctcccgctcttggaccttctgactcctgtaggctccagagcttaccaagcatgcaggccaagggccttgactgcaggccagcattagcagaacacataatggtttcacccttttgnnnnnnnnnnnnnnngcnaggagaaaattgcactaagcgctnccatgatctgcagagcatgttgcttttgnttttnaaaaagcaantnaaaaatgcattcctgaacacagnagcaggggnatcgtgtactgntaggnaanccttctgtgnnnnnnnnnnnnnnnnnnnnnnnnnnnnnnnnnnnncagtnggtaatcnggngcccatggattncttgnactaccaggtaaaccaaaactggaaaggccaagtactgtctctgtagtacttantgaggaccccatggagattttgaaaagtgttatttcttttgtccacaagcactttcaaaaccttngggatataaaaatgggaantnttctcacgaccaacagtaaaaattattgtttaacaatatatacaagctccatgactctttttggtgctaatgattatgc

SEQ ID NO: 1061 - DNA, 557 bp, Mus musculus; identical to SEQ ID NO: 1060
  misc_feature (121)..(135): n is a, c, g, or t
  misc_feature (138)..(138): n is a, c, g, or t
  misc_feature (162)..(162): n is a, c, g, or t
  misc_feature (191)..(191): n is a, c, g, or t
  misc_feature (196)..(196): n is a, c, g, or t
  misc_feature (206)..(206): n is a, c, g, or t
  misc_feature (208)..(208): n is a, c, g, or t
  misc_feature (231)..(231): n is a, c, g, or t
  misc_feature (240)..(240): n is a, c, g, or t
  misc_feature (252)..(252): n is a, c, g, or t
  misc_feature (257)..(257): n is a, c, g, or t
  misc_feature (260)..(260): n is a, c, g, or t
  misc_feature (270)..(305): n is a, c, g, or t
  misc_feature (310)..(310): n is a, c, g, or t
  misc_feature (318)..(318): n is a, c, g, or t
  misc_feature (321)..(321): n is a, c, g, or t
  misc_feature (333)..(333): n is a, c, g, or t
  misc_feature (338)..(338): n is a, c, g, or t
  misc_feature (392)..(392): n is a, c, g, or t
  misc_feature (457)..(457): n is a, c, g, or t
  misc_feature (476)..(476): n is a, c, g, or t
  misc_feature (478)..(478): n is a, c, g, or t

SEQ ID NO: 1062 - DNA, 439 bp, Mus musculus
  misc_feature (149)..(149): n is a, c, g, or t
  misc_feature (187)..(187): n is a, c, g, or t
gattcgtttctatggcgaattctttattggggaagactatgcattttccattcctccaaatgagcctccagttcagccaggccactcccatgaagaggtgaacgggttgcgggtcacagagtggacgacagacctccaggataaagaantcccccaggcctcctgcttagacctttccagcctccanccattccaaggagaagaaagaaggaagtgggaggagctgcaggtgccagagctccagccctgcccacaggtggtgctcagtcagagtccctgtccagcaggaggtgacccgccagccctcaagagcagtctggaccaggaggtgaccatcgagatcgtgctgtccagctctggggatgaggactcccagcacagcccatactgcacagaggagctgaggagccctccagaagacctgcacagtgtcccagcc

SEQ ID NO: 1063 - DNA, 439 bp, Mus musculus; identical to SEQ ID NO: 1062
  misc_feature (149)..(149): n is a, c, g, or t
  misc_feature (187)..(187): n is a, c, g, or t

SEQ ID NO: 1064 - DNA, 544 bp, Mus musculus
  misc_feature (145)..(163): n is a, c, g, or t
  misc_feature (203)..(292): n is a, c, g, or t
  misc_feature (294)..(311): n is a, c, g, or t
  misc_feature (333)..(333): n is a, c, g, or t
  misc_feature (339)..(339): n is a, c, g, or t
  misc_feature (341)..(342): n is a, c, g, or t
  misc_feature (349)..(350): n is a, c, g, or t
  misc_feature (388)..(388): n is a, c, g, or t
  misc_feature (493)..(493): n is a, c, g, or t
  misc_feature (514)..(514): n is a, c, g, or t
  misc_feature (519)..(519): n is a, c, g, or t
ctgtggcccagcagaagaacactgtcaccatcacttacgaagtaggaatcacagcgcagagtgaccacatgaccaacagcagcagaaatgaatgaatctgaacagcatccctgaatcttcacaaaaacatactccaatccctaannnnnnnnnnnnnnnnnnntcagggtcagaaccggggatttaagagaaaatgctaagannnnnnnnnnnnnnnnnnnnnnnnnnnnnnnnnnnnnnnnnnnnnnnnnnnnnnnnnnnnnnnnnnnnnnnnnnnnnnnnnnnnnnnnnngnnnnnnnnnnnnnnnnnnatacttacgccaccattcacanttcctntnntactttnnaaataatggttttaagagaaacacagtgtttgctttantctgaaagcgtgtttttattaattggacacacacaggtgaatgtttgatcccggggctgtaactgtatttgtgtcagtgtccatggagaggtgatgcctgggagntcttgactttcctcctagttntcttntgctttctctgcacagttgtcatat

SEQ ID NO: 1065 - DNA, 544 bp, Mus musculus; identical to SEQ ID NO: 1064
  misc_feature (145)..(163): n is a, c, g, or t
  misc_feature (203)..(292): n is a, c, g, or t
  misc_feature (294)..(311): n is a, c, g, or t
  misc_feature (333)..(333): n is a, c, g, or t
  misc_feature (339)..(339): n is a, c, g, or t
  misc_feature (341)..(342): n is a, c, g, or t
  misc_feature (349)..(350): n is a, c, g, or t
  misc_feature (388)..(388): n is a, c, g, or t
  misc_feature (493)..(493): n is a, c, g, or t
  misc_feature (514)..(514): n is a, c, g, or t
  misc_feature (519)..(519): n is a, c, g, or t

SEQ ID NO: 1066 - DNA, 57 bp, Mus musculus
aagtcacgcaagtccctcaagcagcaggacacagacggcaggcagtatatgacagag

SEQ ID NO: 1067 - DNA, 57 bp, Mus musculus; identical to SEQ ID NO: 1066

SEQ ID NO: 1068 - DNA, 432 bp, Mus musculus
  misc_feature (26)..(26): n is a, c, g, or t
  misc_feature (54)..(74): n is a, c, g, or t
  misc_feature (93)..(161): n is a, c, g, or t
gtctctcgtaattatatctgacctanggggaagctagcagctatgaaaccactnnnnnnnnnnnnnnnnnnnnnaacacctactgcaatggcnnnnnnnnnnnnnnnnnnnnnnnnnnnnnnnnnnnnnnnnnnnnnnnnnnnnnnnnnnnnnnnnnnnnnccaagagtctatatttattttaagccaaaatagacttatttccaaaatcagtgtttctaatataactcatgtttgttgaatgtctagagaaaaaagaaagttgtgctgcttgaagaaaaagtcacgcaagtccctcaagcagcaggacacagacggcaggcagtatatgacagagttgaggactgcaactttaagaatgttttatttttttctttaataaagtcttagtgtttttccctgttttgtctattctgttctccaaacacacaca

SEQ ID NO: 1069 - DNA, 432 bp, Mus musculus; identical to SEQ ID NO: 1068
  misc_feature (26)..(26): n is a, c, g, or t
  misc_feature (54)..(74): n is a, c, g, or t
  misc_feature (93)..(161): n is a, c, g, or t

SEQ ID NO: 1070 - DNA, 261 bp, Mus musculus
cgagaagcacgcacccagctgttgcatcgtcctgttccttctgtgtcatgtaaacttctagtcttgatctctgattaaccttcatcgcctttgacataaggactcaagctggtacctagttgagaaagaggttatccctccctttctgcaccttccccaggactagagtttcaacttaaagcatttgttccagagcctccctcccttctgcagaaacctgaccactatttattgctgctttggggccgagtttcttgccct

SEQ ID NO: 1071 - DNA, 261 bp, Mus musculus; identical to SEQ ID NO: 1070

SEQ ID NO: 1072 - DNA, 218 bp, Mus musculus
  misc_feature (76)..(76): n is a, c, g, or t
  misc_feature (109)..(109): n is a, c, g, or t
  misc_feature (163)..(177): n is a, c, g, or t
cccgcaggagggaacgctcggatcctcgcagccctcccgtctgcctgattaaggggggtcatcttttacttttgcnggggggaggggaggggaggggttgggagaaacnaaagggagaaaaaattaaagacaaatatttgagacttgtgtaaaggacaaacgnnnnnnnnnnnnnnntgattctcacacatcgctctctgcagaaaggggctcatcct

SEQ ID NO: 1073 - DNA, 218 bp, Mus musculus; identical to SEQ ID NO: 1072
  misc_feature (76)..(76): n is a, c, g, or t
  misc_feature (109)..(109): n is a, c, g, or t
  misc_feature (163)..(177): n is a, c, g, or t

SEQ ID NO: 1074 - DNA, 200 bp, Mus musculus
  misc_feature (52)..(52): n is a, c, g, or t
  misc_feature (72)..(72): n is a, c, g, or t
  misc_feature (74)..(89): n is a, c, g, or t
cagaaaggggctcatcctgcctaagcgcttgggaaggggggagtaaggctcngcctgccgctcggattgatnannnnnnnnnnnnnnnngcccccctcccacttctgtgtttgtgtcttctttgtttcttttttcccctttctgtatatagcgtgatttcagattgtaaatagcgcgtcagcgaacttgtttaaatcata

SEQ ID NO: 1075 - DNA, 200 bp, Mus musculus; identical to SEQ ID NO: 1074
  misc_feature (52)..(52): n is a, c, g, or t
  misc_feature (72)..(72): n is a, c, g, or t
  misc_feature (74)..(89): n is a, c, g, or t

SEQ ID NO: 1076 - DNA, 266 bp, Mus musculus
ccaaccaaaccaacatggcaggaggcaaaacccccttagtttgaatggccaagtgatatattttctctaaagaaagttgccaggatcctctttgtaacttgtgacatgaatcagaataaagaattccctctgtcctgcctgcatctgctgaggacactgggtgcttaccatgccctaccagggtgggaaggggccagcatcactcccatgaccaccaggtgccctcagacgagcactccaggagcccaggtagcagtagaagcccc

SEQ ID NO: 1077 - DNA, 266 bp, Mus musculus; identical to SEQ ID NO: 1076

SEQ ID NO: 1078 - DNA, 492 bp, Mus musculus
atggcccctgctactgtccatgcaggcccaggggacactgccactggaaagccaggaacaccaaagggtgcaggaatgacaggccaaggtggcttagcacgaagcagccgaaatgaatacatgcgctcgggcctctattctaccttcacaatacaatccctgcagccacagccacagccacccattcctcctcggcctgcctcagtgcttcctgccacccccaagtgtttattttttataccaaacatgtatttttggctccctcccagccccccaatttcctgcaggcgggtacaaaggacccttttaagtgtccctggagttgggagggaggaatgggggacatggagcctgtcttatatcaatctaggctggaggaggtggatcaaaagactcccaggctcacctcctgtcagcactggcccagaccaggcctgaagacctgggggttggtgatttgggggacggtgctatactcgtctccactacttg

SEQ ID NO: 1079 - DNA, 492 bp, Mus musculus; identical to SEQ ID NO: 1078

SEQ ID NO: 1080 - DNA, 288 bp, Mus musculus
tgaaggtattttaacccctcaggcagtaaatgcagcagatgtctatagatcgccatacagatcatttccaacaatgagttctacaagattgcaacaacgccaggctgactcagagaaattaaaggtcctgctcctgcatttctgatcacttattccggcaccaattctactctgctacactctatagttttcagctcaattccggtctagtgctccaccatgagcactgctgctgggagccaccctgcctttactgccttcctgtgccaattcacagccttctacgag

SEQ ID NO: 1081 - DNA, 288 bp, Mus musculus; identical to SEQ ID NO: 1080

SEQ ID NO: 1082 - DNA, 242 bp, Mus musculus
ccctgcagacagtgggaaggcaagcccggcaccccccccaaggacccagctcctagcgctgtgtataggcctgcttgggtgggaggcagctcctcccaccactgagccatcctcagcagctgcggtgggtttgcattgatgcctgtcagctgcaggcaggcttggtgggccaggataaacaagccttattacacagcgccacctttacacttgaatttgagacccagggtcaaggggccctc

SEQ ID NO: 1083 - DNA, 242 bp, Mus musculus; identical to SEQ ID NO: 1082

SEQ ID NO: 1084 - DNA, 409 bp, Mus musculus
  misc_feature (74)..(74): n is a, c, g, or t
  misc_feature (76)..(76): n is a, c, g, or t
  misc_feature (80)..(93): n is a, c, g, or t
  misc_feature (113)..(113): n is a, c, g, or t
  misc_feature (152)..(152): n is a, c, g, or t
  misc_feature (232)..(232): n is a, c, g, or t
  misc_feature (234)..(234): n is a, c, g, or t
  misc_feature (236)..(236): n is a, c, g, or t
  misc_feature (247)..(247): n is a, c, g, or t
  misc_feature (249)..(249): n is a, c, g, or t
  misc_feature (263)..(284): n is a, c, g, or t
  misc_feature (288)..(319): n is a, c, g, or t
  misc_feature (337)..(337): n is a, c, g, or t
ggctagttttgcacacttgaaaattgtttacttattttacaactgtacatttacattttcctgatgctgtctgntntgtnnnnnnnnnnnnnncgacatgtcgagatcatgcnttgaaaccgcgtcatctccttttcctatgggtttgtttngtttggtaaatccattcagcccattatagacacataactgttaagtttgtagtcttttgttttgttttattgaggtaggntntnttccctgatcntngtcctgcttccacnnnnnnnnnnnnnnnnnnnnnnacgnnnnnnnnnnnnnnnnnnnnnnnnnnnnnnnnagttatattccggacatntgagaagttatcttaaacattaaccagtttccatcattgaatttgatgtggtttttctcaacagcaaattat

SEQ ID NO: 1085 - DNA, 409 bp, Mus musculus; identical to SEQ ID NO: 1084
  misc_feature (74)..(74): n is a, c, g, or t
  misc_feature (76)..(76): n is a, c, g, or t
  misc_feature (80)..(93): n is a, c, g, or t
  misc_feature (113)..(113): n is a, c, g, or t
  misc_feature (152)..(152): n is a, c, g, or t
  misc_feature (232)..(232): n is a, c, g, or t
  misc_feature (234)..(234): n is a, c, g, or t
  misc_feature (236)..(236): n is a, c, g, or t
  misc_feature (247)..(247): n is a, c, g, or t
  misc_feature (249)..(249): n is a, c, g, or t
  misc_feature (263)..(284): n is a, c, g, or t
  misc_feature (288)..(319): n is a, c, g, or t
  misc_feature (337)..(337): n is a, c, g, or t

SEQ ID NO: 1086 - DNA, 459 bp, Mus musculus
  misc_feature (39)..(42): n is a, c, g, or t
  misc_feature (44)..(44): n is a, c, g, or t
  misc_feature (46)..(47): n is a, c, g, or t
  misc_feature (49)..(51): n is a, c, g, or t
  misc_feature (53)..(54): n is a, c, g, or t
  misc_feature (56)..(60): n is a, c, g, or t
  misc_feature (64)..(66): n is a, c, g, or t
  misc_feature (69)..(69): n is a, c, g, or t
  misc_feature (72)..(73): n is a, c, g, or t
  misc_feature (75)..(76): n is a, c, g, or t
  misc_feature (78)..(78): n is a, c, g, or t
  misc_feature (80)..(81): n is a, c, g, or t
  misc_feature (83)..(84): n is a, c, g, or t
  misc_feature (86)..(87): n is a, c, g, or t
  misc_feature (189)..(189): n is a, c, g, or t
  misc_feature (196)..(196): n is a, c, g, or t
  misc_feature (219)..(219): n is a, c, g, or t
  misc_feature (236)..(236): n is a, c, g, or t
  misc_feature (240)..(240): n is a, c, g, or t
  misc_feature (302)..(302): n is a, c, g, or t
  misc_feature (304)..(304): n is a, c, g, or t
  misc_feature (391)..(391): n is a, c, g, or t
  misc_feature (401)..(401): n is a, c, g, or t
  misc_feature (419)..(419): n is a, c, g, or t
  misc_feature (421)..(422): n is a, c, g, or t
  misc_feature (425)..(425): n is a, c, g, or t
  misc_feature (428)..(428): n is a, c, g, or t
  misc_feature (432)..(432): n is a, c, g, or t
gttcacactcaccagggcagaaaggactggcgcaggagnnnnantnntnnncnntnnnnncggnnnagngcnngnnantnngnngnngagggcttccgtgtgatctccaagcgccgtgcctagtttgctgtggcttccgcccgccccgccctggccctgcaagcctctccctgcgccttgatgccgcanggcgccnttctgctgctgctggggcggtgngcggccaggcagctggnggancccacgacgaggaccaggatgagaatgaagacgggaccgagacgcccccagatcatggcgtntntgcggaaaccgacacatagacgaaggaccttgtatacagagctattttacagaaattgcgagtggcaccatggtattttttgtggancctcaccctntcctgggcccgcaccccntnntcntcntcantccctgggcagacattcataagcccgt

SEQ ID NO: 1087 - DNA, 459 bp, Mus musculus; identical to SEQ ID NO: 1086
  misc_feature (39)..(42): n is a, c, g, or t
  misc_feature (44)..(44): n is a, c, g, or t
  misc_feature (46)..(47): n is a, c, g, or t
  misc_feature (49)..(51): n is a, c, g, or t
  misc_feature (53)..(54): n is a, c, g, or t
  misc_feature (56)..(60): n is a, c, g, or t
  misc_feature (64)..(66): n is a, c, g, or t
  misc_feature (69)..(69): n is a, c, g, or t
  misc_feature (72)..(73): n is a, c, g, or t
  misc_feature (75)..(76): n is a, c, g, or t
  misc_feature (78)..(78): n is a, c, g, or t
  misc_feature (80)..(81): n is a, c, g, or t
  misc_feature (83)..(84): n is a, c, g, or t
  misc_feature (86)..(87): n is a, c, g, or t
  misc_feature (189)..(189): n is a, c, g, or t
  misc_feature (196)..(196): n is a, c, g, or t
  misc_feature (219)..(219): n is a, c, g, or t
  misc_feature (236)..(236): n is a, c, g, or t
  misc_feature (240)..(240): n is a, c, g, or t
  misc_feature (302)..(302): n is a, c, g, or t
  misc_feature (304)..(304): n is a, c, g, or t
  misc_feature (391)..(391): n is a, c, g, or t
  misc_feature (401)..(401): n is a, c, g, or t
  misc_feature (419)..(419): n is a, c, g, or t
  misc_feature (421)..(422): n is a, c, g, or t
  misc_feature (425)..(425): n is a, c, g, or t
  misc_feature (428)..(428): n is a, c, g, or t
  misc_feature (432)..(432): n is a, c, g, or t

SEQ ID NO: 1088 - DNA, 416 bp, Mus musculus
  misc_feature (67)..(67): n is a, c, g, or t
  misc_feature (69)..(70): n is a, c, g, or t
  misc_feature (76)..(76): n is a, c, g, or t
  misc_feature (86)..(87): n is a, c, g, or t
  misc_feature (90)..(106): n is a, c, g, or t
  misc_feature (131)..(131): n is a, c, g, or t
  misc_feature (169)..(170): n is a, c, g, or t
  misc_feature (210)..(210): n is a, c, g, or t
ctttctgttctgagagaaaactagggggaggtaatggtgggttgggctcttgggtcccagtagtttnanntctttnagagcacagnntcnnnnnnnnnnnnnnnnntaccttggaataacttggagaattnatgacttccaatcaccccacacaatgtaatgccccatnnaactgtcctggtagaaaacatggtgacctggggatgtatntcaggagtggaccacttcctaaaatgtgcaagttcccaagttccatttccagccttaccctaaccccagaaaaaagaaaaccaaagacaaagacatggcagtgcatcgagaatggtctctttccacttccgctctgtctcctttaatgcacaagtgtgtggttggagagaaggtggtggagtcaggccagagtcaagtggatatga

SEQ ID NO: 1089 - DNA, 416 bp, Mus musculus; identical to SEQ ID NO: 1088
  misc_feature (67)..(67): n is a, c, g, or t
  misc_feature (69)..(70): n is a, c, g, or t
  misc_feature (76)..(76): n is a, c, g, or t
  misc_feature (86)..(87): n is a, c, g, or t
  misc_feature (90)..(106): n is a, c, g, or t
  misc_feature (131)..(131): n is a, c, g, or t
  misc_feature (169)..(170): n is a, c, g, or t
  misc_feature (210)..(210): n is a, c, g, or t

SEQ ID NO: 1090 - DNA, 291 bp, Mus musculus
  misc_feature (49)..(67): n is a, c, g, or t
gctttgctttagagggtagaggacctgccaccttgtcctgctgagaccnnnnnnnnnnnnnnnnnnntttgctctgtgaagaggctcctaagaccctgggggagggaaaacagatacctcatgcactggcccactgtctgacgctccttcatcctctgtgcggtctggagtgagcctggtcccctagccaccccctagccttggtgtcttgagccaattctgagatgtggtctgtgtcctggacctgctgagcctagagagattgtcctatgtatgtctgagatcctggag

SEQ ID NO: 1091 - DNA, 291 bp, Mus musculus; identical to SEQ ID NO: 1090
  misc_feature (49)..(67): n is a, c, g, or t

SEQ ID NO: 1092 - DNA, 300 bp, Mus musculus
  misc_feature (232)..(232): n is a, c, g, or t
actgctgttcacaccctaaatatggccaacttgcctattatgacgttctggccaatgtaggtcaaacctctgaggaaagggaaccttgtttaattcataccgaggccctctgtggagtggctgtgtgtgccctggcccagcctgaagctcagaatgagcccatggtactggggaagcaaccctgttgtctgtccattgcctccacttcctgggtctcagctgtccccttccngacaggtgaggggcactaggagacctccaagggaggaacagccctcgctgcacaggtgtccctctgat

SEQ ID NO: 1093 - DNA, 300 bp, Mus musculus; identical to SEQ ID NO: 1092
  misc_feature (232)..(232): n is a, c, g, or t

SEQ ID NO: 1094 - DNA, 130 bp, Mus musculus
tcttgagtcttctcctgggactcttttccttcagtagggttgccatgtacaactccatacaactggttttgtctcttcatattaaatttatttttttcatgcttcattaggtccttagaagcctattctt

SEQ ID NO: 1095 - DNA, 130 bp, Mus musculus; identical to SEQ ID NO: 1094

SEQ ID NO: 1096 - DNA, 254 bp, Mus musculus
  misc_feature (143)..(143): n is a, c, g, or t
agggcttgcatcctccaggaaggaattcagcaggagctcactgtttttcttatttaaagagtctggagtatgtgtgaagaaaatcaaagcattagcaagccataaggatctggtggtcaaagtgaaagttctaaaagtcttancaaaattataattttagatctgttctaaacaacactgatgtgatgtttcttaagtttgcacgtgggaacaatgcattttgtgaattcttaggttttcattgcgcttgtgta

SEQ ID NO: 1097 - DNA, 254 bp, Mus musculus; identical to SEQ ID NO: 1096
  misc_feature (143)..(143): n is a, c, g, or t

SEQ ID NO: 1098 - DNA, 543 bp, Mus musculus
  misc_feature (264)..(278): n is a, c, g, or t
  misc_feature (501)..(516): n is a, c, g, or t
atctttttggagaccagggctgcttgctgtcagcctgctttctaagtgaaattgactcagtttccccactttaaccccaaattggggcttggaccaagggaggtgagaccccctcaggtaccctcccctttcagaatccatctcttgccacttccacattaccacccttgccctaagcctaaatttctgttcctttttttcttcttttgaaaacgacccagttctatccttttcggtttctccgagtcccctgtaaatagaccnnnnnnnnnnnnnnnatttcttgcccgtctcttccgtccctagacgtgcccccgactccccggaaagagctggctgtcactgtgcccggcccctgcacttcacccaggcagatggagggggtggagccgggtgggcgggtcctcgatgtacttccggttttgaccggcagcgctcctgccccgcccttggaggaccccgtctctgtatataatatatatatgtatgtattgttcctgnnnnnnnnnnnnnnnngccctctgtcaggtcgtccccataaaa

SEQ ID NO: 1099 - DNA, 543 bp, Mus musculus; identical to SEQ ID NO: 1098
  misc_feature (264)..(278): n is a, c, g, or t
  misc_feature (501)..(516): n is a, c, g, or t

SEQ ID NO: 1100 - DNA, 440 bp, Mus musculus
  misc_feature (64)..(106): n is a, c, g, or t
  misc_feature (142)..(176): n is a, c, g, or t
  misc_feature (213)..(237): n is a, c, g, or t
taagcacacgcttgtccttggttcacagtgcgttttctggtctctctccttgacatcctggctnnnnnnnnnnnnnnnnnnnnnnnnnnnnnnnnnnnnnnnnnnnaccatgccatgcgatgatgtcatggcacacttcacnnnnnnnnnnnnnnnnnnnnnnnnnnnnnnnnnnngtcggcaaaattctttgggtgtcaggggccaaaggtnnnnnnnnnnnnnnnnnnnnnnnnngaattacgaaaaattggaaattaaaaaaaagaaaagaaaaaagaaaaaaaaaaatcgcgggttctttggggattcgccgggtgtatagggcgggccaaagggctcaaatcagtgacatcgggaaggcagccctaactggagagggaccgcacgcgcgggatggcgaacgggtctttggcgcaaagggttcacaaggggcaact

SEQ ID NO: 1101 - DNA, 440 bp, Mus musculus; identical to SEQ ID NO: 1100
  misc_feature (64)..(106): n is a, c, g, or t
  misc_feature (142)..(176): n is a, c, g, or t
  misc_feature (213)..(237): n is a, c, g, or t

SEQ ID NO: 1102 - DNA, 235 bp, Mus musculus
  misc_feature (28)..(28): n is a, c, g, or t
  misc_feature (95)..(122): n is a, c, g, or t
  misc_feature (129)..(129): n is a, c, g, or t
atcctgggctccttgagtgcagactgantgctctaagatcagcaaaatgactgaactacatcctaacacttcccagtgtcctctcagtgtctctnnnnnnnnnnnnnnnnnnnnnnnnnnnngtggccnacagaccagtgtggaggcctgtgtgtgggaagtcagcaggtgccaagctattgaaacattggttttatttttttaaaccgatctctgtctctaaaagatgtgatgt

SEQ ID NO: 1103 - DNA, 235 bp, Mus musculus; identical to SEQ ID NO: 1102
  misc_feature (28)..(28): n is a, c, g, or t
  misc_feature (95)..(122): n is a, c, g, or t
  misc_feature (129)..(129): n is a, c, g, or t

SEQ ID NO: 1104 - DNA, 289 bp, Mus musculus
  misc_feature (33)..(33): n is a, c, g, or t
  misc_feature (123)..(123): n is a, c, g, or t
gagtgaaggcctagctcccctgcttccaagacnggtgctttttaagacttctcccaaagctctgagggccaaagttttggacctctaaacattccagtattcagtttggatactgaaaagatnaaggctgaaatactgatttttgtttatgtgaactcagctaatggttgtgtattttaaatctggatccagccacctctggtcacacttacctttcaaaaccccaaaaatgggtcccatggcctcacttccaaattcatgctggagatgcctgcttgtctcggccaga

SEQ ID NO: 1105 - DNA, 289 bp, Mus musculus; identical to SEQ ID NO: 1104
  misc_feature (33)..(33): n is a, c, g, or t
  misc_feature (123)..(123): n is a, c, g, or t

SEQ ID NO: 1106 - DNA, 335 bp, Mus musculus
  misc_feature (114)..(114): n is a, c, g, or t
  misc_feature (153)..(168): n is a, c, g, or t
  misc_feature (253)..(273): n is a, c, g, or t
gagaagggacccaccagggtctgtttacagaggcagggcgtggggctgcttggcttctctaatgcccaccacccagccccactcctgcttgccttccggggctctcccagagcnacagcatggcttgggttgtggaccttcttccccatggannnnnnnnnnnnnnnngtcctgccctgagcacagatgtgtcatgtgtcactcaggagggcatggcagcatctgctactgcaaagtggcccaggccccgcannnnnnnnnnnnnnnnnnnnnacacaatgtaccacttctcctgtgggagaggcactaacgggctgccactgtgtgccagctgc

SEQ ID NO: 1107 - DNA, 335 bp, Mus musculus; identical to SEQ ID NO: 1106
  misc_feature (114)..(114): n is a, c, g, or t
  misc_feature (153)..(168): n is a, c, g, or t
  misc_feature (253)..(273): n is a, c, g, or t

SEQ ID NO: 1108 - DNA, 278 bp, Mus musculus
  misc_feature (108)..(123): n is a, c, g, or t
ttgtgagccggcagctagtccatgctgacggcagccttcgggaccgtcctgggtcctcggcttaccgactccagtattttaggagaggagggtgtgcgccatcacggnnnnnnnnnnnnnnnntagtttatgtaacaactgtatactatgcccggggactgtattccgagggagaggttcccgcctctccatgggttgcggagctccgttatgaaaatgagttccccgtggccagcaagaaccagtccggtgtggttactgaggctttgatcgtacca

SEQ ID NO: 1109 - DNA, 278 bp, Mus musculus; identical to SEQ ID NO: 1108
  misc_feature (108)..(123): n is a, c, g, or t

SEQ ID NO: 1110 - DNA, 305 bp, Mus musculus
  misc_feature (52)..(52): n is a, c, g, or t
  misc_feature (112)..(112): n is a, c, g, or t
cctactgatgttctttattgggagaaagttcttgcaggttttctcaactgtnctttcgcaatgcatggtatccaagtcagttggaaagtgggttttgttgtctgttcgaatntagggtcatttaagaaaggggcagttaagaagcacaatgcctcccatgggacaacattccaaaatgccaaattcttctctttcttacaacaatctataattatataaaataactagtactgggggtagggagagggtagaattggctccattggaaagactctcctgcttcataccgagcttgtcgccatgag

SEQ ID NO: 1111 - DNA, 305 bp, Mus musculus; identical to SEQ ID NO: 1110
  misc_feature (52)..(52): n is a, c, g, or t
  misc_feature (112)..(112): n is a, c, g, or t

SEQ ID NO: 1112 - DNA, 338 bp, Mus musculus
  misc_feature (26)..(26): n is a, c, g, or t
  misc_feature (206)..(223): n is a, c, g, or t
  misc_feature (246)..(246): n is a, c, g, or t
  misc_feature (248)..(248): n is a, c, g, or t
gatcctacgtcattcatgctgtaaangagttctagtgtaagcatgggaacaaacataccacgggaatgtgccctgctgtgtgctctgggggagtctgtgtgtgtcccacgggctgctcctgtttctaaccatgcgggggacacgagttgctgggaactggggttcatcctttctggcagtgtttcccactgctctccatggatttnnnnnnnnnnnnnnnnnnggagacaaagatgtcttcctctntntctctctctctctctctagcaagtgcgttttaatgatttttcacgtgtatgtctgacttgcctggcaagactgcgtatgaggggcttgac

SEQ ID NO: 1113 - DNA, 338 bp, Mus musculus; identical to SEQ ID NO: 1112
  misc_feature (26)..(26): n is a, c, g, or t
  misc_feature (206)..(223): n is a, c, g, or t
  misc_feature (246)..(246): n is a, c, g, or t
  misc_feature (248)..(248): n is a, c, g, or t

SEQ ID NO: 1114 - DNA, 490 bp, Mus musculus
  misc_feature (45)..(55): n is a, c, g, or t
  misc_feature (57)..(58): n is a, c, g, or t
  misc_feature (222)..(222): n is a, c, g, or t
  misc_feature (228)..(228): n is a, c, g, or t
  misc_feature (231)..(231): n is a, c, g, or t
  misc_feature (254)..(254): n is a, c, g, or t
  misc_feature (329)..(329): n is a, c, g, or t
  misc_feature (338)..(413): n is a, c, g, or t
  misc_feature (431)..(431): n is a, c, g, or t
gtctctgttgctttgactgtctcaataaatccatccattctttannnnnnnnnnnannctcatgttttttttggcctccttcccaagaacccagttctgctaaataactcagccacgttgtctgcttgtcacacaaccagagtttctctcttgtatctattacgtttctctatctatccttcactttctctaatcatctgaaaactccacactataaactanaaacanttntatcatcacagaagtccactttntttttttttaaagaaaatatctaggtatactctccgctaaattttaggaaccagctgaattgaccttaccagttntggaaaacnnnnnnnnnnnnnnnnnnnnnnnnnnnnnnnnnnnnnnnnnnnnnnnnnnnnnnnnnnnnnnnnnnnnnnnnnnnnctgcgacacctctggttncaacccgtagtcagctgcaagaacggcctgggcccattgacttcggatctcttggatac

SEQ ID NO: 1115 - DNA, 490 bp, Mus musculus; identical to SEQ ID NO: 1114
  misc_feature (45)..(55): n is a, c, g, or t
  misc_feature (57)..(58): n is a, c, g, or t
  misc_feature (222)..(222): n is a, c, g, or t
  misc_feature (228)..(228): n is a, c, g, or t
  misc_feature (231)..(231): n is a, c, g, or t
  misc_feature (254)..(254): n is a, c, g, or t
  misc_feature (329)..(329): n is a, c, g, or t
  misc_feature (338)..(413): n is a, c, g, or t
  misc_feature (431)..(431): n is a, c, g, or t

SEQ ID NO: 1116 - DNA, 367 bp, Mus musculus
  misc_feature (70)..(92): n is a, c, g, or t
  misc_feature (110)..(110): n is a, c, g, or t
  misc_feature (199)..(251): n is a, c, g, or t
agcatctctgttttgcaatacattgtactcattatgtggagaatgtgcaggacataggaaaccctcactnnnnnnnnnnnnnnnnnnnnnnnctggggctcaggcgtgcntcctaaggcatgtggacacgtcacaggaacacgtctgaatccagggcacacatttcagtttggaagaaagaccaatagggcatccgcannnnnnnnnnnnnnnnnnnnnnnnnnnnnnnnnnnnnnnnnnnnnnnnnnnnnggaggagaatcagctggaggcaaggggctgtccctgacattcctgcgccaatcttgggtgaagggctgtcagtgctatgatacacaggcagataggcagatactatcactgggacc

SEQ ID NO: 1117 - DNA, 367 bp, Mus musculus; identical to SEQ ID NO: 1116
  misc_feature (70)..(92): n is a, c, g, or t
  misc_feature (110)..(110): n is a, c, g, or t
  misc_feature (199)..(251): n is a, c, g, or t

SEQ ID NO: 1118 - DNA, 512 bp, Mus musculus
  misc_feature (37)..(38): n is a, c, g, or t
  misc_feature (176)..(176): n is a, c, g, or t
  misc_feature (180)..(180): n is a, c, g, or t
  misc_feature (183)..(183): n is a, c, g, or t
  misc_feature (188)..(188): n is a, c, g, or t
  misc_feature (209)..(209): n is a, c, g, or t
  misc_feature (215)..(215): n is a, c, g, or t
  misc_feature (226)..(226): n is a, c, g, or t
  misc_feature (249)..(249): n is a, c, g, or t
  misc_feature (262)..(262): n is a, c, g, or t
  misc_feature (272)..(272): n is a, c, g, or t
  misc_feature (419)..(419): n is a, c, g, or t
  misc_feature (455)..(455): n is a, c, g, or t
  misc_feature (468)..(468): n is a, c, g, or t
tccgattttctgtgtcttatatagcccagactagccnncaactccagtcaaggataaccttgaacttctgctcctcttcctgcttctacctctgagtgctgggattcactatcctttatactaaagaaacagaaaatatgtatacaatgaaagcaaatgtgattcacagagaaacntggntcntatgntaaagcgcagtctaaataccnaaatgnagagtacaaantgacaacccacctccaccccatntgaacaattactnaaataatggngtaataactgcaaaataaagacccataggttgaaaaaaatgaacacaccatgatgacacggctgaccatatttccttaattgttaaagaagagaaataaaatttgtttaacttttaaaaaacattgaaacttagtttacagttcccntgaataaaattgagaagaaaaaaagaaagtgcgaanagaggaggggaantaggagaaaagaaaagggggggcgccctagaggttccaggctac

SEQ ID NO: 1119 - DNA, 512 bp, Mus musculus; identical to SEQ ID NO: 1118
  misc_feature (37)..(38): n is a, c, g, or t
  misc_feature (176)..(176): n is a, c, g, or t
  misc_feature (180)..(180): n is a, c, g, or t
  misc_feature (183)..(183): n is a, c, g, or t
  misc_feature (188)..(188): n is a, c, g, or t
  misc_feature (209)..(209): n is a, c, g, or t
  misc_feature (215)..(215): n is a, c, g, or t
  misc_feature (226)..(226): n is a, c, g, or t
  misc_feature (249)..(249): n is a, c, g, or t
  misc_feature (262)..(262): n is a, c, g, or t
  misc_feature (272)..(272): n is a, c, g, or t
  misc_feature (419)..(419): n is a, c, g, or t
  misc_feature (455)..(455): n is a, c, g, or t
  misc_feature (468)..(468): n is a, c, g, or t

SEQ ID NO: 1120 - DNA, 555 bp, Mus musculus
  misc_feature (131)..(131): n is a, c, g, or t
  misc_feature (290)..(319): n is a, c, g, or t
  misc_feature (378)..(378): n is a, c, g, or t
  misc_feature (381)..(381): n is a, c, g, or t
  misc_feature (406)..(406): n is a, c, g, or t
  misc_feature (514)..(528): n is a, c, g, or t
cttcactcagaaacccctgtgcttggagcagtttattaagttccaaagtcacagtgggtaaccatatactgttccccctctgtgagccatggggttgaagtagccattaaaaagagagacttatttctgcnatggtttttctttgttccaaggtcttttagaaacatagttaaagcccagtgtagtggtgcatgtctttagtccaagtatttgggaagcagaggcagatgactctagctaggttctaggtcagcatgatctacagagtgaattacagggcaggcagagcnnnnnnnnnnnnnnnnnnnnnnnnnnnnnnagagaaaagaaaagtgcaggtgaggccgtgggttctccaagctcagggaataactgcangcncagttagaggcagcacggagaggancggagaggagaggagaggagaagaggccaggggtctctgctgctactcctgtccccaggtcacagagaggagtcactgtctgggcaaggtacagtctgccaggcatgnnnnnnnnnnnnnnnggaggtctcaggaccaaggggcttgtc

SEQ ID NO: 1121 - DNA, 555 bp, Mus musculus; identical to SEQ ID NO: 1120
  misc_feature (131)..(131): n is a, c, g, or t
  misc_feature (290)..(319): n is a, c, g, or t
  misc_feature (378)..(378): n is a, c, g, or t
  misc_feature (381)..(381): n is a, c, g, or t
  misc_feature (406)..(406): n is a, c, g, or t
  misc_feature (514)..(528): n is a, c, g, or t

SEQ ID NO: 1122 - DNA, 403 bp, Mus musculus
  misc_feature (157)..(183): n is a, c, g, or t
  misc_feature (232)..(232): n is a, c, g, or t
  misc_feature (316)..(316): n is a, c, g, or t
  misc_feature (350)..(365): n is a, c, g, or t
cattgacaacgtggatgctttcatgaatatccgcctggccaatgtcacctataccgaccgctggggacatcaggttgagttggatgacctttttgtgaccggtcgtaacgtccgatacgtccatatcccagatggtgtggacatcactgctactatnnnnnnnnnnnnnnnnnnnnnnnnnnntgtgcgcaactttggtggcaagggtcaaggtcgtcgagagttcccctcnaaaaggccatgagactgtgtcctcgttaaagttccagcaccacctcagggacctccggtgttctgagccaactcccggccatcnttccccaccagtaacagacatgtcacagcggccnnnnnnnnnnnnnnnnttttcagacacaccctgggacccagaattccttctgct

SEQ ID NO: 1123 - DNA, 403 bp, Mus musculus; identical to SEQ ID NO: 1122
  misc_feature (157)..(183): n is a, c, g, or t
  misc_feature (232)..(232): n is a, c, g, or t
  misc_feature (316)..(316): n is a, c, g, or t
  misc_feature (350)..(365): n is a, c, g, or t

SEQ ID NO: 1124 - DNA, 477 bp, Mus musculus
  misc_feature (40)..(40): n is a, c, g, or t
  misc_feature (72)..(72): n is a, c, g, or t
agtgctttctcttgggcctttatgttctttgtttttcccnttcatcgatactccgaggggtggccagtaagnagccaaaccatcacacccaggagatgctggatttggtctctctgccccatccactaatggaaagcagagcctgtggcaaagccaagcaagctcttcctccctggtggtttggctcctttaaggcggccccccggctctaggactccgttttcattttttcccattcctctcctttttttcttttctcgtcccttgggcttctcccaccctttctgcttctgatcgaacacattagcaaatgtgccgagcttgaagaagaattgaaaacggtgacgaacaacttgaagtcactggaggctcaggctgagaaggtaggccaggagcatggcatggggaagacgtcttttttaagaactgctcaaaagagccctcggtggagacagtaacggcgcaggaggcatttta

SEQ ID NO: 1125 - DNA, 477 bp, Mus musculus; identical to SEQ ID NO: 1124
  misc_feature (40)..(40): n is a, c, g, or t
  misc_feature (72)..(72): n is a, c, g, or t

SEQ ID NO: 1126 - DNA, 227 bp, Mus musculus
  misc_feature (144)..(144): n is a, c, g, or t
tcttccgtcgaatgaaaacaagatgagcgataaaccagacttgtcagaagttgaaacatttgacaaagcaaagttgaagaaaactaatactgaagtaaaaaatactcttccgtcgaaggaaactatccagcaagagaaagaacncaatgaaagaacataaaatgagactctcctttcaagagcaacaacaacattgcctaacagtcatggctctaggcttgtttctg

SEQ ID NO: 1127 - DNA, 227 bp, Mus musculus; identical to SEQ ID NO: 1126
  misc_feature (144)..(144): n is a, c, g, or t

SEQ ID NO: 1128 - DNA, 457 bp, Mus musculus
  misc_feature (55)..(55): n is a, c, g, or t
gactcctgcggctgaacagacccatccacctgacccgtgctgtccggcccgtggncctgcccagttcctgtgtaactacaggggccatgtgtcatgtctcaggatggggtactacaaacaagccatgggacccattcccagaccggctccagtgcctcaacctctccactgtctccaatgagacgtgccgggctgtgtttcctggaagagtgacggagaatatgttgtgtgcaggtggagaagccgggaaggatgcctgtcagggtgactctggaggccccctggtgtgtggaggggttcttcaaggtctggtttcctggggatctgttgggccttgtggtcaaaaaggtattccaggagtctacacgaaggtctgcaaatacacggactggatcagaatagtcatcaggaataactaagtgactccctcagcctgcatgcagctctgcttagggac

SEQ ID NO: 1129 - DNA, 457 bp, Mus musculus; identical to SEQ ID NO: 1128
  misc_feature (55)..(55): n is a, c, g, or t

SEQ ID NO: 1130 - DNA, 253 bp, Mus musculus
tccccaaattagaaccggatctggacccttccatttgttagtcagggggtccttccattttaccagtgcataagaattagaagtaactggatgccaatggcgatctgctgcagactgacctttaatatcagtttgcaaaaaatttaggacaaataaggtgaaggcaaagtgagcctttggtgaccttgggggatatagctgcccctcttttgttttaaaaagccaattttttaaggtgcgatgagcacgttca

SEQ ID NO: 1131 - DNA, 253 bp, Mus musculus; identical to SEQ ID NO: 1130

SEQ ID NO: 1132 - DNA, 418 bp, Mus musculus
  misc_feature (256)..(256): n is a, c, g, or t
tctacctttggagtgaatctaaagagaaatatgaaaagcccaaagatgaacagaaagagaaactcaacatatgggtgaacaacctctatgtcttctttgtaagtgtgctcttcagtgcctacaaacgtgaagagatgctcaaggagaaagtgaaggaaaatcagctccaggaagcagagctggctcagcagaggcagatagagaacgaagagctagaagccaggctgaacatcctacgggaagaggaggccagganacaagacttcgaacttgacatcactgtgctcaaggagccatcggagatcccagcctctcagcctctcacgcccagcccccctaaagaggacctggcttccatccagactagcaaggccagccctggcaagaagaagaagaagtgaaggcacgcagtgtcatg

SEQ ID NO: 1133 - DNA, 418 bp, Mus musculus; identical to SEQ ID NO: 1132
  misc_feature (256)..(256): n is a, c, g, or t

SEQ ID NO: 1134 - DNA, 424 bp, Mus musculus
  misc_feature (319)..(319): n is a, c, g, or t
acgagtacaggttggcgctcgcgttggcgccggccacggtgtcggcgaagagccagttgcgtcttccgatgacaaacgggcggatcgaattctcgcagccgttgttgtctatcgggtagttgccgctggtgacgaagcgctccagcttggcccactgcgaggacaggtagtgcagcgccttgcccagcaaactgcctggcagcaccgcatgaaagttggccagcagcaaggcctggatctcttgcagcacgggcacactgttggcttggcggctatgcagcagcgcattcgcatccagcccttgctctttggccagggnctccacgcggtagagcttgccgatcagcgcgatgaacctggccgccaattgctcagccccccggttggctttgggcaaggcctgcagcgcgtcattgaagtaacg

SEQ ID NO: 1135 - DNA, 424 bp, Mus musculus; identical to SEQ ID NO: 1134
  misc_feature (319)..(319): n is a, c, g, or t

SEQ ID NO: 1136 - DNA, 530 bp, Mus musculus
  misc_feature (51)..(65): n is a, c, g, or t
  misc_feature (146)..(183): n is a, c, g, or t
  misc_feature (194)..(194): n is a, c, g, or t
  misc_feature (200)..(201): n is a, c, g, or t
  misc_feature (226)..(226): n is a, c, g, or t
  misc_feature (230)..(231): n is a, c, g, or t
  misc_feature (233)..(233): n is a, c, g, or t
  misc_feature (237)..(237): n is a, c, g, or t
  misc_feature (244)..(244): n is a, c, g, or t
  misc_feature (246)..(246): n is a, c, g, or t
  misc_feature (280)..(280): n is a, c, g, or t
  misc_feature (295)..(295): n is a, c, g, or t
  misc_feature (306)..(306): n is a, c, g, or t
  misc_feature (309)..(310): n is a, c, g, or t
  misc_feature (318)..(318): n is a, c, g, or t
  misc_feature (338)..(338): n is a, c, g, or t
  misc_feature (343)..(343): n is a, c, g, or t
  misc_feature (352)..(352): n is a, c, g, or t
  misc_feature (467)..(467): n is a, c, g, or t
  misc_feature (477)..(477): n is a, c, g, or t
gtctctttcacactcagcttcttggtatatacatattcctttgtgagtgtnnnnnnnnnnnnnnnattaaaggatcctgtcagggtttctcattcccaaagccttccacagaagcaggggactcttgggctctgtcctttaccccnnnnnnnnnnnnnnnnnnnnnnnnnnnnnnnnnnnnnnggtggatgagnacaagnnggttgctgacaaatgccggcttagntctnntngtgntaaacanancatacattcagaatgtaaggagagaggggactgngaggatagagccttnggtctaaatgntanntggttgtntcggtagttaggcatccttntcatntttggcttntccacattcacatgtattgtatttatatgtatacacataggtgtatgcctatatatatatatatatatatatatatattttggctgtaataataaacatctctgtctttggtgtnttcttccttntacactctggaaagttagtgctgatttttctttcttaccttgaagacttgaag

SEQ ID NO: 1137 - DNA, 530 bp, Mus musculus; identical to SEQ ID NO: 1136
  misc_feature (51)..(65): n is a, c, g, or t
  misc_feature (146)..(183): n is a, c, g, or t
  misc_feature (194)..(194): n is a, c, g, or t
  misc_feature (200)..(201): n is a, c, g, or t
  misc_feature (226)..(226): n is a, c, g, or t
  misc_feature (230)..(231): n is a, c, g, or t
  misc_feature (233)..(233): n is a, c, g, or t
  misc_feature (237)..(237): n is a, c, g, or t
  misc_feature (244)..(244): n is a, c, g, or t
  misc_feature (246)..(246): n is a, c, g, or t
  misc_feature (280)..(280): n is a, c, g, or t
  misc_feature (295)..(295): n is a, c, g, or t
  misc_feature (306)..(306): n is a, c, g, or t
  misc_feature (309)..(310): n is a, c, g, or t
  misc_feature (318)..(318): n is a, c, g, or t
  misc_feature (338)..(338): n is a, c, g, or t
  misc_feature (343)..(343): n is a, c, g, or t
  misc_feature (352)..(352): n is a, c, g, or t
  misc_feature (467)..(467): n is a, c, g, or t
  misc_feature (477)..(477): n is a, c, g, or t

SEQ ID NO: 1138 - DNA, 333 bp, Mus musculus
  misc_feature (26)..(26): n is a, c, g, or t
  misc_feature (34)..(34): n is a, c, g, or t
  misc_feature (40)..(40): n is a, c, g, or t
  misc_feature (54)..(54): n is a, c, g, or t
  misc_feature (60)..(60): n is a, c, g, or t
ccacctcagctgtagttgtacctgcnacggggcnggcccntcacagtgcggggncgggcntgctaaggatctcagtgaaggaggtggtgtttgggtctctcactgctgcgctggtcctggccacggtgctgctgaccctgagggcatggcgccgaggtatatgccccactggaccctgctgctacccagccccacactatgccccagctcggcaggatcaggagtgccaggttagcatgctgccagcggggttccctctgtccccagacctgccccctgagcctggtaagaccacagcgctgtgatgggaggagcctttctagctaccttcct

SEQ ID NO: 1139 - DNA, 333 bp, Mus musculus; identical to SEQ ID NO: 1138
  misc_feature (26)..(26): n is a, c, g, or t
  misc_feature (34)..(34): n is a, c, g, or t
  misc_feature (40)..(40): n is a, c, g, or t
  misc_feature (54)..(54): n is a, c, g, or t
  misc_feature (60)..(60): n is a, c, g, or t

SEQ ID NO: 1140 - DNA, 518 bp, Mus musculus
  misc_feature (237)..(332): n is a, c, g, or t
  misc_feature (400)..(400): n is a, c, g, or t
  misc_feature (472)..(472): n is a, c, g, or t
  misc_feature (474)..(474): n is a, c, g, or t
gtttggctcagctggcccctgttctaaagagtgcatcgtggcttccttggctgagtttatggaacccctctttcctttctctgctgccgcgtctcatctgaattcttctcctttggcagcacaagagctataactgtttctggggtctaaaagagcgagaactcaagatcaccttgtcctagttagctattctcttgcaatgaaaaaaaaccacgactaaaagcaacttgggaaggnnnnnnnnnnnnnnnnnnnnnnnnnnnnnnnnnnnnnnnnnnnnnnnnnnnnnnnnnnnnnnnnnnnnnnnnnnnnnnnnnnnnnnnnnnnnnnnnaaagatgctggaagtcttttggtgtctgccgtgaagagtgtgccaagaaagaaagtttctacatcttntgctggaatggcaaactgtgctgtgtgaagcccaagaatgtgcccctgtggtcacagaatttagattagcantntaaatcccaaggccacagaaatgaagttggacctcgaaagagtc

SEQ ID NO: 1141 - DNA, 518 bp, Mus musculus; identical to SEQ ID NO: 1140
  misc_feature (237)..(332): n is a, c, g, or t
  misc_feature (400)..(400): n is a, c, g, or t
  misc_feature (472)..(472): n is a, c, g, or t
  misc_feature (474)..(474): n is a, c, g, or t

SEQ ID NO: 1142 - DNA, 265 bp, Mus musculus
  misc_feature (196)..(196): n is a, c, g, or t
  misc_feature (198)..(198): n is a, c, g, or t
  misc_feature (200)..(201): n is a, c, g, or t
  misc_feature (203)..(203): n is a, c, g, or t
  misc_feature (207)..(207): n is a, c, g, or t
cagtgtcaggattcccagccagctgttgagagtgcttgtggtgcttcacctcagccacccttccttcctgggtatgattcaggcttcttgactgaagctgagaaaccaggcttatccagccccagcttgtgtcttctcatctagagaaaaagagaagagcattaaggagctcatgaggaaccctaagtggttcctnangnntncttnggtgttcggtattttgtttgtgatttgaatgtgtgcaagaatgcctggctttaactgt

SEQ ID NO: 1143 - DNA, 265 bp, Mus musculus; identical to SEQ ID NO: 1142
  misc_feature (196)..(196): n is a, c, g, or t
  misc_feature (198)..(198): n is a, c, g, or t
  misc_feature (200)..(201): n is a, c, g, or t
  misc_feature (203)..(203): n is a, c, g, or t
  misc_feature (207)..(207): n is a, c, g, or t

SEQ ID NO: 1144 - DNA, 168 bp, Mus musculus
  misc_feature (67)..(67): n is a, c, g, or t
ggtgtcctcttggagactcatgccatgctttggaatagggcaagccagggcttgtttggactggtcnattaggctagcctaatctctgcatagcttgcagctgataggttggagggagcccccttttctatcttaccctgaggcaagggtttgcacaacccctgcgaa

SEQ ID NO: 1145 - DNA, 168 bp, Mus musculus; identical to SEQ ID NO: 1144
  misc_feature (67)..(67): n is a, c, g, or t

SEQ ID NO: 1146 - DNA, 309 bp, Mus musculus
cgacaggggctgttacagattgtataattaggtttattattagaccatgagctaacaggtttggacaagtattaaaattctaggtgggacagcaatttgaagtggatggaaaagttagaatccccatcagaaatattttcgaaagaagttaaacaatttattgcatcttatttaaaaacattctttttctgaggtctttttcgccttttgttttggatgaaggaattaaaatttttgacttagtaggaattctttatcgaaacctgcctggtctactgtagtggattctgggacatcaagggctatgta

SEQ ID NO: 1147 - DNA, 309 bp, Mus musculus; identical to SEQ ID NO: 1146

SEQ ID NO: 1148 - DNA, 206 bp, Mus musculus
  misc_feature (26)..(26): n is a, c, g, or t
  misc_feature (138)..(138): n is a, c, g, or t
  misc_feature (173)..(173): n is a, c, g, or t
agaaccaggtagtgaggccctaggcntgtagaccctttaatatgcatggaatctgcagcagcaggagctctggttagacttaaggcacattaccttacacaggtcagtgttgtaggctgggggctccaggaaggagcngtctggtttagaaagacaattatattccctgtctntctggaccagtgtccctcagaaggaaggcaggt

SEQ ID NO: 1149 - DNA, 206 bp, Mus musculus; identical to SEQ ID NO: 1148
  misc_feature (26)..(26): n is a, c, g, or t
  misc_feature (138)..(138): n is a, c, g, or t
  misc_feature (173)..(173): n is a, c, g, or t

SEQ ID NO: 1150 - DNA, 476 bp, Mus musculus
  misc_feature (26)..(26): n is a, c, g, or t
  misc_feature (137)..(182): n is a, c, g, or t
  misc_feature (304)..(324): n is a, c, g, or t
  misc_feature (451)..(451): n is a, c, g, or t
gtcagtggctcataagtattaccttntaaatatccggctacctgtaaatgagaaaaagaaaatcaatgttggaattggggagataaaggacattcggttggtgggaatccaccaaaacggaggtttcactaaggtannnnnnnnnnnnnnnnnnnnnnnnnnnnnnnnnnnnnnnnnnnnnntggtgtggtattggaggaggatcaccatgatgtcccgacctccagtgcttctggaaaaagtcatctttgcccttgggatttccatgacctttatcaatatccctgtggaatggttttctatnnnnnnnnnnnnnnnnnnnnngctgttatttggtgacatccgacagggcatcttctatgcaatgcttctttctttctggatcatcttctgtggcgagcacatgatggatcaacatgaacggaatcacattgcagggtactggaagcangttggaccaattgctgttggctcct

SEQ ID NO: 1151 - DNA, 476 bp, Mus musculus; identical to SEQ ID NO: 1150
  misc_feature (26)..(26): n is a, c, g, or t
  misc_feature (137)..(182): n is a, c, g, or t
  misc_feature (304)..(324): n is a, c, g, or t
  misc_feature (451)..(451): n is a, c, g, or t

SEQ ID NO: 1152 - DNA, 223 bp, Mus musculus
  misc_feature (84)..(100): n is a, c, g, or t
  misc_feature (146)..(160): n is a, c, g, or t
caggatcttccaatgaaagtaaaaaacagaatgtgctaattaaaattatactctgttaagtgatttttcctgccagaggcaaannnnnnnnnnnnnnnnngaccatttccttcagagcaactgtcattcagttacataggagtatnnnnnnnnnnnnnnnttcagacgcctgtgaaaggaacataggacgaatttccttatagatgtcagatcactgacaaaa

SEQ ID NO: 1153 - DNA, 223 bp, Mus musculus; identical to SEQ ID NO: 1152
  misc_feature (84)..(100): n is a, c, g, or t
  misc_feature (146)..(160): n is a, c, g, or t

SEQ ID NO: 1154 - DNA, 476 bp, Mus musculus
  misc_feature (41)..(43): n is a, c, g, or t
  misc_feature (48)..(49): n is a, c, g, or t
  misc_feature (56)..(56): n is a, c, g, or t
  misc_feature (60)..(60): n is a, c, g, or t
  misc_feature (64)..(64): n is a, c, g, or t
  misc_feature (68)..(68): n is a, c, g, or t
  misc_feature (70)..(70): n is a, c, g, or t
  misc_feature (90)..(90): n is a, c, g, or t
  misc_feature (212)..(212): n is a, c, g, or t
  misc_feature (327)..(327): n is a, c, g, or t
tcagagtcagactatgaagggatcgagaccttactgtttgnnngtggnntgtttgnaganacantaananaattccaagaagtaatcaanagtaaagcttgtgaatgggaagaaaggcaaaggctgatgaagcagcagcttgaggcacttgcagacttacaacaaagcttgtgctcatatcaagaaaatggggacctggactgctcaagttntacatcaggatccttgctacctcctgaggaccaccagtaaaagctgttcctcaggaaaactggatggggcctccatgttctccaaggatcgaggaagtcttcctgcctaccctgnccaccccagtcaaggacagcaacaccagagctttgctcagccttaaatggaatcttagagctttctcttgcttctgctgctcctgcagatggtctcatcatggtctcctttcagtattaaaactccatcagcatagagcagaagctgtc

SEQ ID NO: 1155 - DNA, 476 bp, Mus musculus; identical to SEQ ID NO: 1154
  misc_feature (41)..(43): n is a, c, g, or t
  misc_feature (48)..(49): n is a, c, g, or t
  misc_feature (56)..(56): n is a, c, g, or t
  misc_feature (60)..(60): n is a, c, g, or t
  misc_feature (64)..(64): n is a, c, g, or t
  misc_feature (68)..(68): n is a, c, g, or t
  misc_feature (70)..(70): n is a, c, g, or t
  misc_feature (90)..(90): n is a, c, g, or t
  misc_feature (212)..(212): n is a, c, g, or t
  misc_feature (327)..(327): n is a, c, g, or t

SEQ ID NO: 1156 - DNA, 329 bp, Mus musculus
caccagcgtggatggcgtacgcagtgggggtgtagagttgtacactacatacatatcaagtcccactcggtgtccctccccgccgtgccctgcaacctgaaaagcagaatccttgttgccagcatcagagccagtgagcgcttgatgggctcggatgctgcaagttcacggttagtgggaggcactggcgaggacactgggcttggggatcttagaggccttttctctgtaggacatccgaggttctcctgtggagccgctgttctcttctgacggtgggagagagtcaggatgactaaaatgttaagggcccgaaaccatggaaatgc

SEQ ID NO: 1157 - DNA, 329 bp, Mus musculus; identical to SEQ ID NO: 1156

SEQ ID NO: 1158 - DNA, 316 bp, Mus musculus
  misc_feature (155)..(155): n is a, c, g, or t
cattgggctgtcatctttgagctgcttatcaaaatacagatcattattgcatatatgcaaattctgttttattttatccctaataacagaagtctcccttccatggttttagcgttgcctttttaaaaaggcactcaccctgagttgttaagaantggacctgccccaccctcagattccttaaaggatgaagagtgtgctgtacactcagcatatgtgcctcttgtatgcaaggactactgattgaagtctgttttgctgtgtctggttatgttgtctgcacttttatgaaatcactacaatagatctacgttgg

SEQ ID NO: 1159 - DNA, 316 bp, Mus musculus; identical to SEQ ID NO: 1158
  misc_feature (155)..(155): n is a, c, g, or t

SEQ ID NO: 1160 - DNA, 97 bp, Mus musculus
agacatactacagcaggggaccgtagcgtgcacactgttggtggtttttaatgagcctctctttccccactaggctgtctcactttacttgttcacc

SEQ ID NO: 1161 - DNA, 97 bp, Mus musculus; identical to SEQ ID NO: 1160

SEQ ID NO: 1162 - DNA, 527 bp, Mus musculus
  misc_feature (242)..(242): n is a, c, g, or t
  misc_feature (308)..(308): n is a, c, g, or t
  misc_feature (310)..(311): n is a, c, g, or t
catttaaacatatcccgtggtgccctccacatctgggttgaactacagctgcctggtgtcggcttgctgaaaggactggattgtagctgttggttcgcgcctggtgtctgcccgtctagaggactggtctgcagctgctgaatcatatttgatgtttgctatgggactgaactgctgcccaagaagatcaagctgaacagaaactgggaacagaagaccggagcttgcaagttggcgatgancacagcccagcatctgaccagccggtggtatctctacaccattgccctttggccacaaaaagaaancnngagtctgtgactgcttgtcttttagatgctttgaggcagagtgaccatggtgaccttcagtggccgtgggtcctcttttaggcaccgttggtcatgccgtgttcccaagcatggaaacctctggagaccttagtctggatgcacagggatgtgggggacacatagctctcccattccatctcatcattaagttttattgcacaacaccaaaggcag

SEQ ID NO: 1163 - DNA, 527 bp, Mus musculus; identical to SEQ ID NO: 1162
  misc_feature (242)..(242): n is a, c, g, or t
  misc_feature (308)..(308): n is a, c, g, or t
  misc_feature (310)..(311): n is a, c, g, or t

SEQ ID NO: 1164 - DNA, 490 bp, Mus musculus
  misc_feature (183)..(183): n is a, c, g, or t
  misc_feature (200)..(200): n is a, c, g, or t
  misc_feature (210)..(210): n is a, c, g, or t
  misc_feature (212)..(212): n is a, c, g, or t
  misc_feature (292)..(292): n is a, c, g, or t
  misc_feature (294)..(294): n is a, c, g, or t
  misc_feature (297)..(350): n is a, c, g, or t
aagttcgcaagtcttgtgaaaaacaatcccatcgcaccgaggatactccaggatggagcggagggcgagagtgcagtcgtgttagtgagaaagagcccacccgatatgctcctattgcacttctattgaagaataaaaggctgcggtctctccagacgagaacttgtcagatattttaaagtntggctttcagtcctttntggtgaatgntntggtgtccgccgatgccttagaagtggagttaagagttgtgagctgccgttttttggttctgggactcgaactcgtttcntntgnnnnnnnnnnnnnnnnnnnnnnnnnnnnnnnnnnnnnnnnnnnnnnnnnnnnnngaaccagagagatggtgccaggcctgccaacctgagttcaatagcagaacccacacagtagcaaaagaaccaactctgacctcccctctccccctcccctctccttcccctctccagtagtcactccagagacacccaaa

SEQ ID NO: 1165 - DNA, 490 bp, Mus musculus; identical to SEQ ID NO: 1164
  misc_feature (183)..(183): n is a, c, g, or t
  misc_feature (200)..(200): n is a, c, g, or t
  misc_feature (210)..(210): n is a, c, g, or t
  misc_feature (212)..(212): n is a, c, g, or t
  misc_feature (292)..(292): n is a, c, g, or t
  misc_feature (294)..(294): n is a, c, g, or t
  misc_feature (297)..(350): n is a, c, g, or t

SEQ ID NO: 1166 - DNA, 540 bp, Mus musculus
  misc_feature (371)..(371): n is a, c, g, or t
  misc_feature (388)..(389): n is a, c, g, or t
  misc_feature (481)..(481): n is a, c, g, or t
  misc_feature (515)..(515): n is a, c, g, or t
agagcaaccaggtgttcctgggcagggtctccgtccctcgaaccgtgcaggagcgagggcatcaggaggtgctggagggcttccccccctcggagacagagctgaacctcaaacaagccctgaagctccagattgagggctctgaccccagcttcaactacaagaaggaaacgcccttgtgagaggttccagttgtatgagacagaaggcattgtggttggaagagccgctcagctgccagatggaagccagatgcctgagggcgtgctgctgagactgactcccgcccgcagtactgtgtcctgacttactgtcatgtgcctacccagtaaggctgcccttctcagcacagcccccatgctgaagcagtntccaccacaccgaatanntgcagatgtaaactgcagttcctccatacaaccaaacccggttttgagtattttcccatttggtaaacgtgcatgtgccacggtcaggtgtntccgcaaaggcagtgttccgtatttattgttttntgcgttgtggtgtgtactcagtccc

SEQ ID NO: 1167 - DNA, 540 bp, Mus musculus; identical to SEQ ID NO: 1166
  misc_feature (371)..(371): n is a, c, g, or t
  misc_feature (388)..(389): n is a, c, g, or t
  misc_feature (481)..(481): n is a, c, g, or t
  misc_feature (515)..(515): n is a, c, g, or t

SEQ ID NO: 1168 - DNA, 512 bp, Mus musculus
  misc_feature (232)..(233): n is a, c, g, or t
  misc_feature (271)..(271): n is a, c, g, or t
cctgctgggtttcgtttggttcattgtgaagtaaaaatcaatgaagctggcagccacagaggtgagctggtgggcaaaggtagacagaggtagcccagttctctctatctagcccccgagtgttctgaaagtacaacgtgtagcgtttcagggcatttcaaaagtccctcccaagtactccccctactccatgtgtttgataatgtgtttcagtgcccctatgctccacccnngtgagacctggcctgttcctgcctttgcagctacactnggtgagaaaccagccaaaggatacaagaattgtcctgtgcactccacctgattttccaactccaggaaactgaggctcacattgcaggagtccctgtccagcacagttagaaaacagaagagctggggttcccctgctctgtcttccctcaggttttctgctctgtgtagcctagagctgcctcctgatccctccaagactcaggtccaagtgcagtcccgaatgtggactgaaatgtgga

SEQ ID NO: 1169 - DNA, 512 bp, Mus musculus; identical to SEQ ID NO: 1168
  misc_feature (232)..(233): n is a, c, g, or t
  misc_feature (271)..(271): n is a, c, g, or t

SEQ ID NO: 1170 - DNA, 524 bp, Mus musculus
  misc_feature (309)..(309): n is a, c, g, or t
  misc_feature (322)..(322): n is a, c, g, or t
ggagatgccgcttcagccatcccaagccacctccctcagctgagactctgtggagaaccctcgtggtccagtcagctttctgaatagtgttccattttgaaagccaaggcctcatcttggtttttcatcaactctaaggcccttcagttatgtcgaaaggttttatttatgttttctgtttttcctcagtgctgatttagaagtgggccacccaggaggattcaaaagccttgcttgtttcccagtaggattgttgtatctacacttcctgttaacagtctaagctgggatcatctgtgtttgtgcatnaagttttgacccntcaaagttgtagctatggaagggtggggaaagctgtcttcagtctctcactcaggctgatgcttctctgacgggtgaggctgtggtgatagaggggtgggtgctgatggcctcatctggaaatgcaggagagagttagaagggctggctgatagctcaccagcactgtccctgtcctggcccctgaccctggggaatgctgc

SEQ ID NO: 1171 - DNA, 524 bp, Mus musculus; identical to SEQ ID NO: 1170
  misc_feature (309)..(309): n is a, c, g, or t
  misc_feature (322)..(322): n is a, c, g, or t

SEQ ID NO: 1172 - DNA, 470 bp, Mus musculus
  misc_feature (420)..(434): n is a, c, g, or t
tttgtggacatcctcctcggagcccctccgcctggcatgcagccttacctgttcctgcccggcacgctggagaagactctcggcaggcctaaaggtggcccaagttccccagaggtgctgcccactgcccaggaacctctaaaaggcaccaacaggggagtatgtgctcatggtctgtgatgtgaccagcactcccttcctgggccacaggctgcccaccaccttcaaacacctgcggatcttagccaagggggacacccactggccccatgtccctgaagatcaccagaagctctaagctagcggctactcttggctgttggacataaaggagccagcaataccctcatgggaaggccagccttccctgaatggagattgatgctgcttctcccagggaccacatcctctctattcctnnnnnnnnnnnnnnntaggactgcccacgtgagccccacagctactgacgt

SEQ ID NO: 1173 - DNA, 470 bp, Mus musculus; identical to SEQ ID NO: 1172
  misc_feature (420)..(434): n is a, c, g, or t

SEQ ID NO: 1174 - DNA, 438 bp, Mus musculus
  misc_feature (297)..(298): n is a, c, g, or t
  misc_feature (301)..(301): n is a, c, g, or t
  misc_feature (303)..(304): n is a, c, g, or t
  misc_feature (306)..(306): n is a, c, g, or t
  misc_feature (313)..(313): n is a, c, g, or t
  misc_feature (316)..(316): n is a, c, g, or t
  misc_feature (332)..(332): n is a, c, g, or t
tagggctcccagacacgtctcacttctgggatgcctttccttgcaaaagacattccaggccctgagtccttggaggtatgagtaagtacatgaatgaagcaatagcagtagtccacagcaagagatgtcccaggattataaaacaggaaatctgtctcctcttcaatgtcacaaactttttagaagtactaacatgttgtagtttaatttcatgttttacttgaagcagaaggtgttgcttgaaagaggagtcattttgtattatttttttgctaatacccatttggagctataaannaanannangatcctntgnattaatttataagtgntaaacagtgtggaaatatgcatcctttaaatcaagcagctgaacacttactaaagtgttcctgtatagcaggtatttaatggtcacagttgtttcacttcaactgt

SEQ ID NO: 1175 - DNA, 438 bp, Mus musculus; identical to SEQ ID NO: 1174
  misc_feature (297)..(298): n is a, c, g, or t
  misc_feature (301)..(301): n is a, c, g, or t
  misc_feature (303)..(304): n is a, c, g, or t
  misc_feature (306)..(306): n is a, c, g, or t
  misc_feature (313)..(313): n is a, c, g, or t
  misc_feature (316)..(316): n is a, c, g, or t
  misc_feature (332)..(332): n is a, c, g, or t

SEQ ID NO: 1176 - DNA, 275 bp, Mus musculus
cgacaaagttcaactgaagatgctatggtaactttttctcttttgctttaaaactgtcttttgttttcaaacaaaactgatttatatcatgagttttgggagctttagtaacatgtctgtggctacttctccttttacacaaatatgatagcatatttttcatggtaaggaaaaaaataaaatcaaaatttgctttaatttatgctcattaggattgaactgtcagcttaaaatactttctatgtttctgcactgccaatgtctgttttatgtat

SEQ ID NO: 1177 - DNA, 275 bp, Mus musculus; identical to SEQ ID NO: 1176

SEQ ID NO: 1178 - DNA, 375 bp, Mus musculus
  misc_feature (43)..(43): n is a, c, g, or t
  misc_feature (87)..(87): n is a, c, g, or t
  misc_feature (111)..(111): n is a, c, g, or t
  misc_feature (196)..(196): n is a, c, g, or t
  misc_feature (209)..(209): n is a, c, g, or t
  misc_feature (284)..(284): n is a, c, g, or t
  misc_feature (287)..(287): n is a, c, g, or t
  misc_feature (336)..(337): n is a, c, g, or t
tcttggttagaatgcacttgctagtttccaatggatgggagantacacgatgctgcactcacagtttaatgagttgctttccctcanccttaagggaacttttcttttctntccacaacagcactgaagttttagtaagtgaatgagattatctgttttcagggttggttttagagtactgtaaattaattagctntcttcctaaagantcgtaactcccttcaatagactgaatggtgggtgtgggaggggggatagggaagggagagaggtagtttgtaganaanaaaaaagaaaaaaagagctacatttaccttaaaatacagagaaaaaaannaaaaaaaaggtcctgtcctgtcctgttggaaatttaag

SEQ ID NO: 1179 - DNA, 375 bp, Mus musculus; identical to SEQ ID NO: 1178
  misc_feature (43)..(43): n is a, c, g, or t
  misc_feature (87)..(87): n is a, c, g, or t
  misc_feature (111)..(111): n is a, c, g, or t
  misc_feature (196)..(196): n is a, c, g, or t
  misc_feature (209)..(209): n is a, c, g, or t
  misc_feature (284)..(284): n is a, c, g, or t
  misc_feature (287)..(287): n is a, c, g, or t
  misc_feature (336)..(337): n is a, c, g, or t

SEQ ID NO: 1180 - DNA, 482 bp, Mus musculus
tgcagcttcacctgcgaattttcaaataattaccctggaagttgtgatattttaatatattattcctagtgacagtaggctctacactatgccctcctttctcttagttttattggtgacatagcctccaacaagatgattggctgactcaagaatagaattctgtatacctgcagttctgtattgaaatcttcatacaccagaatattagagcaaactgaaagccatctctccagactgcctgcattttccttctgttccaactctaattccaaagtcttgtgtgtgtttctaacatcaaaacaaaagaatatggctgtagatttatatccttcatcccaaagttctagtatttttagtatcaatactgataaactttttgttagcattctgtctaagctttggaccacagttacctgacactataaagggggctgtttgccccctttgctctcttgctttctgttgctcttgctcttccc

SEQ ID NO: 1181 - DNA, 482 bp, Mus musculus; identical to SEQ ID NO: 1180

SEQ ID NO: 1182 - DNA, 525 bp, Mus musculus
  misc_feature (46)..(46): n is a, c, g, or t
  misc_feature (58)..(58): n is a, c, g, or t
  misc_feature (60)..(60): n is a, c, g, or t
  misc_feature (62)..(70): n is a, c, g, or t
  misc_feature (72)..(72): n is a, c, g, or t
  misc_feature (74)..(75): n is a, c, g, or t
  misc_feature (101)..(105): n is a, c, g, or t
  misc_feature (118)..(132): n is a, c, g, or t
  misc_feature (277)..(292): n is a, c, g, or t
  misc_feature (398)..(398): n is a, c, g, or t
  misc_feature (409)..(409): n is a, c, g, or t
  misc_feature (468)..(485): n is a, c, g, or t
ccttactgggacaaaagttgtaatgtactgtaccttaataaaaatnttgatcaaatcncnannnnnnnnnanannaaaatgctaatattatttagccaaannnnnatctatttatttnnnnnnnnnnnnnnnttttaatttccatagtgtgtgaaaatagtgattataatgactgatgcatgacaagagcttcaagaaattgatggcgcatacagatgaaaagaaatggctcacctggtaccttatgggtggcagggacaactcaatagaaagtgtnnnnnnnnnnnnnnnnatctgaaatgttcagtgtcagtcattgtcctcatgtcagctagtatctctctccaattacctcctcttttatcaaaattaattttgaaagtgatttcccatagctncctatcatgtntttagctctcaaccaccccttatcaattacttagggcgttatttattccagtagattannnnnnnnnnnnnnnnnnactttctcacgttgcccactttccgtacctggccagtgtg

SEQ ID NO: 1183 - DNA, 525 bp, Mus musculus; identical to SEQ ID NO: 1182
  misc_feature (46)..(46): n is a, c, g, or t
  misc_feature (58)..(58): n is a, c, g, or t
  misc_feature (60)..(60): n is a, c, g, or t
  misc_feature (62)..(70): n is a, c, g, or t
  misc_feature (72)..(72): n is a, c, g, or t
  misc_feature (74)..(75): n is a, c, g, or t
  misc_feature (101)..(105): n is a, c, g, or t
  misc_feature (118)..(132): n is a, c, g, or t
  misc_feature (277)..(292): n is a, c, g, or t
  misc_feature (398)..(398): n is a, c, g, or t
  misc_feature (409)..(409): n is a, c, g, or t
  misc_feature (468)..(485): n is a, c, g, or t

SEQ ID NO: 1184 - DNA, 352 bp, Mus musculus
  misc_feature (63)..(63): n is a, c, g, or t
  misc_feature (69)..(69): n is a, c, g, or t
  misc_feature (84)..(84): n is a, c, g, or t
cccattcttgacaaactagagaggtgcccgtgaggggaggcgacagaactgaagcccgagtangacatnatgtgcaaagtcaantcttgggttatagatcaaaagaaacctgttcgcttctatcatgactggaatgacaaagagattgaagtgttgaataaacacttatttttgacttcaaaaccaatggtctacttggtgaatctttctgaaaaagactatataagaaagaaaaacaaatgcaatttcaagttcttatcaagtggcgatggtatactagtgcacatcatgaggacgatgatcatagaagtgtatctttctttgtaaggaaaagactattgccccacaataa

SEQ ID NO: 1185 - DNA, 352 bp, Mus musculus; identical to SEQ ID NO: 1184
  misc_feature (63)..(63): n is a, c, g, or t
  misc_feature (69)..(69): n is a, c, g, or t
  misc_feature (84)..(84): n is a, c, g, or t

SEQ ID NO: 1186 - DNA, 576 bp, Mus musculus
  misc_feature (220)..(220): n is a, c, g, or t
  misc_feature (225)..(225): n is a, c, g, or t
  misc_feature (239)..(239): n is a, c, g, or t
  misc_feature (264)..(264): n is a, c, g, or t
  misc_feature (400)..(400): n is a, c, g, or t
ggataggatctttcactctacctaacaccataactcccctctttgcctctcctgcctgctgatttaggcatgaggagcccagagcagcaggatagcagtcaccttctgggtcaatacagtcactgttgtatgtcccagatacaagtttgtctttcttctggactaagacctatagaccaggagagcataaggaagcaacaattttgcttgtgggtcattnagggntaatagtgactgantcacctccaaatggtaccccttttntgggccttcacgccttggctaagttagaaggtgtcacatactagggacagacagctttcaaggtcccttgccttggcatagcaaaggattctcttctggtgttgcaacaaagtcttcaaaagtgatcttcctgttntgtcaagccacctgcttcagatgggagcatggatcagtgaaggcaacgagccaggcccactgctgcccttcagctgtgacttgagtttcctgatcgaagtgccgctgtgtgtgagatatgggggttgtaaatggtcaggtgttgtatttggggaaggcaaatcctcatttggagta

SEQ ID NO: 1187 - DNA, 576 bp, Mus musculus; identical to SEQ ID NO: 1186
  misc_feature (220)..(220): n is a, c, g, or t
  misc_feature (225)..(225): n is a, c, g, or t
  misc_feature (239)..(239): n is a, c, g, or t
  misc_feature (264)..(264): n is a, c, g, or t
  misc_feature (400)..(400): n is a, c, g, or t

SEQ ID NO: 1188 - DNA, 346 bp, Mus musculus
ggttccatcttcttccctgtctctgtactccttccccaaggaagccctcttagctcccatcagaatgagggcttagcttctgtccttcaaaagaccagacccggtgccatcgccagtggccttccctctcacctctgcttttaagagcaaaggtgccctgccaggcttattacagcaataaacaattctaatgcaatggaggtgtccggattatgcctgcaatgcctttgtgccctgtaattactagtagcacctctcgtacataccagagagtgtgataaactgtggtcaccttagccatacatggttcctgtttcggggccactgaggttgcttctaacatccc

SEQ ID NO: 1189 - DNA, 346 bp, Mus musculus; identical to SEQ ID NO: 1188

SEQ ID NO: 1190 - DNA, 289 bp, Mus musculus
  misc_feature (204)..(205): n is a, c, g, or t
  misc_feature (224)..(224): n is a, c, g, or t
aggctagaacctgaggaccaggtgtgggtgcaggtgggcgtgggtgattacattggcatctatgccagcatcaagacagacagtaccttctctggatttctcgtctattctgactggcacagctccccagtcttcgcttaaaacacagtgaacccggagctggcacttgctcctcagtggagggtgtgacactaacccgcgcanngcataccaggagggctggncccctggaatattgtgaatgacttaggaagagagggagccacttccagtcccactgctggcaatg

SEQ ID NO: 1191 - DNA, 289 bp, Mus musculus; identical to SEQ ID NO: 1190
  misc_feature (204)..(205): n is a, c, g, or t
  misc_feature (224)..(224): n is a, c, g, or t

SEQ ID NO: 1192 - DNA, 436 bp, Mus musculus
  misc_feature (27)..(50): n is a, c, g, or t
  misc_feature (266)..(317): n is a, c, g, or t
  misc_feature (383)..(383): n is a, c, g, or t
agggttcctacctggctggccagagcnnnnnnnnnnnnnnnnnnnnnnnngggacacaggaagtgaaagtggaccctgataagcccctggaaggtgtccgattcctggcactgcagagcaaaaaaacactgctggtcccaacaccacgactgcgaacagggctgtttaacaagatcacgccaccccctggagccaccaaagacattctgaggaaatgtgccacctcccagagcaggctgggaagcaagcctctgtcatttggaacnnnnnnnnnnnnnnnnnnnnnnnnnnnnnnnnnnnnnnnnnnnnnnnnnnnnctggtctggaaacacactcgagggatggagagccagggttcgcgtcttacatacaataacacttgntggctttttaaagaaccacaaaccctgtgtcatttccatattgtcccctgagt

SEQ ID NO: 1193 - DNA, 436 bp, Mus musculus; identical to SEQ ID NO: 1192
  misc_feature (27)..(50): n is a, c, g, or t
  misc_feature (266)..(317): n is a, c, g, or t
  misc_feature (383)..(383): n is a, c, g, or t

SEQ ID NO: 1194 - DNA, 304 bp, Mus musculus
  misc_feature (26)..(26): n is a, c, g, or t
  misc_feature (151)..(217): n is a, c, g, or t
  misc_feature (244)..(246): n is a, c, g, or t
  misc_feature (248)..(249): n is a, c, g, or t
  misc_feature (251)..(251): n is a, c, g, or t
  misc_feature (253)..(253): n is a, c, g, or t
tttcacagaatgatttggtcttcccngtggagacggttggttgccttgcacatatttgttagtcaagactggatacagggtcactcagcaatgctttgggcttttgatgtgtgtgcttattcagatactgttttgattctgtcccatctgnnnnnnnnnnnnnnnnnnnnnnnnnnnnnnnnnnnnnnnnnnnnnnnnnnnnnnnnnnnnnnnnnnntgggtgctgctccctacaaaaggattnnnanncntncttgagaagactcctttccacatgtctctcctgcatcacaggccaaagttt

SEQ ID NO: 1195 - DNA, 304 bp, Mus musculus; identical to SEQ ID NO: 1194
  misc_feature (26)..(26): n is a, c, g, or t
  misc_feature (151)..(217): n is a, c, g, or t
  misc_feature (244)..(246): n is a, c, g, or t
  misc_feature (248)..(249): n is a, c, g, or t
  misc_feature (251)..(251): n is a, c, g, or t
  misc_feature (253)..(253): n is a, c, g, or t

SEQ ID NO: 1196 - DNA, 595 bp, Mus musculus
  misc_feature (26)..(40): n is a, c, g, or t
  misc_feature (96)..(96): n is a, c, g, or t
  misc_feature (128)..(128): n is a, c, g, or t
  misc_feature (140)..(141): n is a, c, g, or t
  misc_feature (150)..(150): n is a, c, g, or t
  misc_feature (154)..(155): n is a, c, g, or t
  misc_feature (163)..(163): n is a, c, g, or t
  misc_feature (182)..(182): n is a, c, g, or t
  misc_feature (184)..(184): n is a, c, g, or t
  misc_feature (196)..(197): n is a, c, g, or t
  misc_feature (201)..(202): n is a, c, g, or t
  misc_feature (206)..(207): n is a, c, g, or t
  misc_feature (211)..(211): n is a, c, g, or t
  misc_feature (213)..(213): n is a, c, g, or t
  misc_feature (216)..(232): n is a, c, g, or t
  misc_feature (234)..(234): n is a, c, g, or t
  misc_feature (245)..(245): n is a, c, g, or t
  misc_feature (249)..(249): n is a, c, g, or t
  misc_feature (254)..(254): n is a, c, g, or t
  misc_feature (258)..(258): n is a, c, g, or t
  misc_feature (261)..(261): n is a, c, g, or t
  misc_feature (263)..(263): n is a, c, g, or t
  misc_feature (266)..(266): n is a, c, g, or t
  misc_feature (269)..(269): n is a, c, g, or t
  misc_feature (274)..(274): n is a, c, g, or t
  misc_feature (276)..(276): n is a, c, g, or t
  misc_feature (278)..(283): n is a, c, g, or t
  misc_feature (286)..(290): n is a, c, g, or t
gtcttggtgtctcagcatccaaccannnnnnnnnnnnnnngcaggactggggccctcaggaagtgatgcttagggcaggctgcgagctgcccacangtggaataagcatggtgatcgtgtcttggtanttttaactggcnnatagagtanatannaagcatangcaaagtatagaggggtangntagcctgtttgnnaganntagnngatnanggnnnnnnnnnnnnnnnnntnctgatgttgantccnatgcnagcnaantncantcntcagngncnnnnnnttnnnnnttatagcgaattcgatgtaatggtgttgcgaagaacactctggttgacactctctagagttgtataacacctagagcgctgagatacagattgtagagtgtcaatgaggtgtcgacaataatatggtgagaaaaaaagagaaaaaatcacggcgactccttagaggtaatgtcacgagctgctgtaaggaagcatgccatttgttgagcagagtccagaggagtggagagcgctgctcaacagctgcccgggtagtgcgcagccccgagttctttcgcccacagagtgtccacaatgcgccgcgt

SEQ ID NO: 1197 - DNA, 595 bp, Mus musculus; identical to SEQ ID NO: 1196
  misc_feature (26)..(40): n is a, c, g, or t
  misc_feature (96)..(96): n is a, c, g, or t
  misc_feature (128)..(128): n is a, c, g, or t
  misc_feature (140)..(141): n is a, c, g, or t
  misc_feature (150)..(150): n is a, c, g, or t
  misc_feature (154)..(155): n is a, c, g, or t
  misc_feature (163)..(163): n is a, c, g, or t
  misc_feature (182)..(182): n is a, c, g, or t
  misc_feature (184)..(184): n is a, c, g, or t
  misc_feature (196)..(197): n is a, c, g, or t
  misc_feature (201)..(202): n is a, c, g, or t
  misc_feature (206)..(207): n is a, c, g, or t
  misc_feature (211)..(211): n is a, c, g, or t
  misc_feature (213)..(213): n is a, c, g, or t
  misc_feature (216)..(232): n is a, c, g, or t
  misc_feature (234)..(234): n is a, c, g, or t
  misc_feature (245)..(245): n is a, c, g, or t
  misc_feature (249)..(249): n is a, c, g, or t
  misc_feature (254)..(254): n is a, c, g, or t
  misc_feature (258)..(258): n is a, c, g, or t
  misc_feature (261)..(261): n is a, c, g, or t
  misc_feature (263)..(263): n is a, c, g, or t
  misc_feature (266)..(266): n is a, c, g, or t
  misc_feature (269)..(269): n is a, c, g, or t
  misc_feature (274)..(274): n is a, c, g, or t
  misc_feature (276)..(276): n is a, c, g, or t
  misc_feature (278)..(283): n is a, c, g, or t
  misc_feature (286)..(290): n is a, c, g, or t

SEQ ID NO: 1198 - DNA, 515 bp, Mus musculus
  misc_feature (394)..(394): n is a, c, g, or t
  misc_feature (405)..(405): n is a, c, g, or t
ctgaccaattcattttgatatgtgtattttcaaatgaacaaaaatgttagtagttataatttgcaagttaatgtagtataatggcgattgtaacaagaaccttcagaaaagttagaaccttgctgttaatctcatctgctgtgtgtgaagatcaatcagtggtcccttagattcttccctgctaaccaaggaaacagggtcggccttgataaatcaagggagttgcctgatgaaaggaagtacaaactactagttgttcagcattcttttcctaactgcaaatctatttttataagttaatgtaaataatgttcatactagaattctaactggttttcatttttataacgggtagacagatcttccttaaacttttgaaaataaaatgttcacntagatttttgnaaaatgcattttctttgtcctagaacaaattttttagttttatcttgtcaaactgtaccaatgtaaaccgtaatttaccaaagagaagtcataattttgcatggtcttac

SEQ ID NO: 1199 - DNA, 515 bp, Mus musculus; identical to SEQ ID NO: 1198
  misc_feature (394)..(394): n is a, c, g, or t
  misc_feature (405)..(405): n is a, c, g, or t

SEQ ID NO: 1200 - DNA, 516 bp, Mus musculus
  misc_feature (47)..(47): n is a, c, g, or t
  misc_feature (58)..(58): n is a, c, g, or t
  misc_feature (60)..(60): n is a, c, g, or t
  misc_feature (68)..(68): n is a, c, g, or t
  misc_feature (470)..(470): n is a, c, g, or t
  misc_feature (477)..(477): n is a, c, g, or t
  misc_feature (489)..(489): n is a, c, g, or t
cgttgactttgacacagttaattatttatgtaaatacatgcatcccngtagccggcangngggatgcntgaatctcgagccagtctccaggaacaactgcaaacctgacacatggtactgtgcatccattcataaaacacttaaaactgtgaaaatatggtttacattaaaaatgtacataaaggtagacggagaactcgattcagccagttagcttgtacattttagggggcttttcacattaactgcccgtctatgtcatttagagtttgacacgataacttgtatttaaggaattatgtagtgtataaatcggtcgaggatctgggggaggtggagaagcttactgtaggactcagcttgtaaggttcgttttgttttgactctggtcttggtgcaaatgttagttatgccttattcataccagttagagcaccgtgctgtgacatgggtatatccgtgctgcccgnccctttnataattatttgntgcagatttgtgactgtctctattaac

SEQ ID NO: 1201 - DNA, 516 bp, Mus musculus; identical to SEQ ID NO: 1200
  misc_feature (47)..(47): n is a, c, g, or t
  misc_feature (58)..(58): n is a, c, g, or t
  misc_feature (60)..(60): n is a, c, g, or t
  misc_feature (68)..(68): n is a, c, g, or t
  misc_feature (470)..(470): n is a, c, g, or t
  misc_feature (477)..(477): n is a, c, g, or t
  misc_feature (489)..(489): n is a, c, g, or t

SEQ ID NO: 1202 - DNA, 481 bp, Mus musculus
  misc_feature (75)..(75): n is a, c, g, or t
  misc_feature (152)..(154): n is a, c, g, or t
  misc_feature (156)..(159): n is a, c, g, or t
  misc_feature (161)..(164): n is a, c, g, or t
  misc_feature (343)..(372): n is a, c, g, or t
  misc_feature (374)..(374): n is a, c, g, or t
tgaacaccaaagtaagcctaaaaggagtctgaggaaaaagcttcctagcaaggaaatgcaagatgcgtaggcccntggcttttaaagttcattcggaagaatatattttaaaatactgaaatgttcctaaacatttttatattaacttattnnntnnnntnnnnttaggttttaaatcaagattttgcttttattattttcatacattttcagagatgaagatgcaaggagcttccttaatacctcagataattcaaataagagttctatccctgcaacttattgttaacctgagtagaaaagtcagtgttttattacaattgagaaacagactacctgtagnnnnnnnnnnnnnnnnnnnnnnnnnnnnnncnttgtaccttagacgagcagtgagttctttcaagacgtagggaaatgagcatttttactaatgatttctagttcctctgctctcacgtatgttcatcttctgtgtcaa

SEQ ID NO: 1203 - DNA, 481 bp, Mus musculus; identical to SEQ ID NO: 1202
  misc_feature (75)..(75): n is a, c, g, or t
  misc_feature (152)..(154): n is a, c, g, or t
  misc_feature (156)..(159): n is a, c, g, or t
  misc_feature (161)..(164): n is a, c, g, or t
  misc_feature (343)..(372): n is a, c, g, or t
  misc_feature (374)..(374): n is a, c, g, or t

SEQ ID NO: 1204 - DNA, 582 bp, Mus musculus
ggaaggtttctgtctgtgactcccccaactccctgaaccccccaagtctgtctccagtcattaatcctggcagctctccctgaatgggagaatttcctcagtttcccttctcactcctgtccccaaagtctcctcaggtgccctgcagaagaacaagattgtggggaggggggtcccaccagaggccctaggagggtgccagctccccctgctgagccctcttatcatgtcatgtgtccccacactgtctctgtccaccaatctaatccagggaaacttcagtcatgacacagggcaccctctcctctgtcctcttcccctcttggggaagtgaaaggaaccagagaaagaagggacccgggctgtgatggtggctgtggcggtggtagtggtggcggtggctcagagttcgaggtcgttggagatgcgggtgacgagggtgcggaaggccagggcggtgcccgccacacggcggaagaggacgcccctgaggccgggccggggcagctggcacacctccacttcgaaatgggacaggggctcgggcccgcccgcacccccgtgcaggcaggccagcaggaa

SEQ ID NO: 1205 - DNA, 582 bp, Mus musculus; identical to SEQ ID NO: 1204

SEQ ID NO: 1206 - DNA, 275 bp, Mus musculus
  misc_feature (209)..(209): n is a, c, g, or t
cagtggcctggtgcagggcatccactgcagccatcgtgatgaggaccgtacacgcctgctggtagactccatcctgcagggcttcaaaccccaggtctttcccgatgcctacaccctcaccttcatccctgtcataagcacaaccacgaccagcacacctctcaaggtactccgcctgacggtgcacactcccaaggctcagggtgagncacagctgtacgagactgaccagggggaggtatttctaaggcgcgatgggagcatccagggcccac

SEQ ID NO: 1207 - DNA, 275 bp, Mus musculus; identical to SEQ ID NO: 1206
  misc_feature (209)..(209): n is a, c, g, or t

SEQ ID NO: 1208 - DNA, 251 bp, Mus musculus
  misc_feature (26)..(26): n is a, c, g, or t
  misc_feature (36)..(36): n is a, c, g, or t
  misc_feature (168)..(169): n is a, c, g, or t
gaaatctccgttgtttaggattcctntgtgaaagantggacttatgattatgagaagctgtcttttgcttgaattctcatgggatttaactctttccaagaaatgcaaaacccatcagaaagttgaatgtgtgtgcatttcagatacaattctggattgtctgggctnnaggtattccagttatggcctggtaaacaggagtattctgcacgtaaatcatgctgtatattcagatggaacatcacttaagt

SEQ ID NO: 1209 - DNA, 251 bp, Mus musculus; identical to SEQ ID NO: 1208
  misc_feature (26)..(26): n is a, c, g, or t
  misc_feature (36)..(36): n is a, c, g, or t
  misc_feature (168)..(169): n is a, c, g, or t

SEQ ID NO: 1210 - DNA, 157 bp, Mus musculus
ttcaacaagttgactctgctgaccgaccctcctacagccagactgacccccagcctggaggctggactgcagcgggacctgctgatgcactccaggaggggaacttagttaggcagctcctggggaagcctatatccctgggcctctgaagcacaga

SEQ ID NO: 1211 - DNA, 157 bp, Mus musculus; identical to SEQ ID NO: 1210

SEQ ID NO: 1212 - DNA, 590 bp, Mus musculus
  misc_feature (59)..(59): n is a, c, g, or t
  misc_feature (61)..(61): n is a, c, g, or t
  misc_feature (132)..(150): n is a, c, g, or t
  misc_feature (204)..(204): n is a, c, g, or t
  misc_feature (206)..(218): n is a, c, g, or t
  misc_feature (220)..(220): n is a, c, g, or t
  misc_feature (222)..(222): n is a, c, g, or t
  misc_feature (248)..(262): n is a, c, g, or t
  misc_feature (299)..(299): n is a, c, g, or t
  misc_feature (304)..(304): n is a, c, g, or t
  misc_feature (321)..(321): n is a, c, g, or t
  misc_feature (325)..(325): n is a, c, g, or t
  misc_feature (348)..(357): n is a, c, g, or t
  misc_feature (359)..(359): n is a, c, g, or t
  misc_feature (361)..(361): n is a, c, g, or t
  misc_feature (363)..(364): n is a, c, g, or t
  misc_feature (366)..(367): n is a, c, g, or t
  misc_feature (369)..(369): n is a, c, g, or t
  misc_feature (372)..(372): n is a, c, g, or t
  misc_feature (377)..(377): n is a, c, g, or t
  misc_feature (380)..(380): n is a, c, g, or t
  misc_feature (390)..(390): n is a, c, g, or t
  misc_feature (396)..(396): n is a, c, g, or t
  misc_feature (405)..(405): n is a, c, g, or t
  misc_feature (426)..(426): n is a, c, g, or t
  misc_feature (434)..(435): n is a, c, g, or t
  misc_feature (437)..(437): n is a, c, g, or t
  misc_feature (439)..(439): n is a, c, g, or t
  misc_feature (441)..(441): n is a, c, g, or t
  misc_feature (443)..(443): n is a, c, g, or t
  misc_feature (457)..(457): n is a, c, g, or t
  misc_feature (476)..(476): n is a, c, g, or t
  misc_feature (525)..(525): n is a, c, g, or t
  misc_feature (527)..(527): n is a, c, g, or t
  misc_feature (538)..(538): n is a, c, g, or t
taagcaccacagctcacccaaaagggagaaaaagatactcaggagatccagccagcggncnacggtcatcaacagaaggaagaggccacccatgcgcaccagcaccgtctggacctggccctgtaggctgannnnnnnnnnnnnnnnnnnctctgtgggacgcggttgtcactgtctcagccggcaccttctggagatcagctngnnnnnnnnnnnnncncntctcagctgccttccccggggatctnnnnnnnnnnnnnnnctgccttcccacagccctgcttctgtctctgggcacntacangacttcttacccacccntaantttccccctggttgaggacagannnnnnnnnntngntnncnngnatntaagnttntccccctttntgcctntcagtttgnatcatccgcagctcagttggnttctgccnntntntntnttgttccatcctgntcccagccaccttcccctnttgccgaagctcactcatcaaggcgcctgagttttgttcccgaccaagntntactgaccatntaaagcgacctaaacacaccaataagatgacaccatccctttgcttttagag

SEQ ID NO: 1213 - DNA, 590 bp, Mus musculus; identical to SEQ ID NO: 1212
  misc_feature (59)..(59): n is a, c, g, or t
  misc_feature (61)..(61): n is a, c, g, or t
  misc_feature (132)..(150): n is a, c, g, or t
  misc_feature (204)..(204): n is a, c, g, or t
  misc_feature (206)..(218): n is a, c, g, or t
  misc_feature (220)..(220): n is a, c, g, or t
  misc_feature (222)..(222): n is a, c, g, or t
  misc_feature (248)..(262): n is a, c, g, or t
  misc_feature (299)..(299): n is a, c, g, or t
  misc_feature (304)..(304): n is a, c, g, or t
  misc_feature (321)..(321): n is a, c, g, or t
  misc_feature (325)..(325): n is a, c, g, or t
  misc_feature (348)..(357): n is a, c, g, or t
  misc_feature (359)..(359): n is a, c, g, or t
  misc_feature (361)..(361): n is a, c, g, or t
  misc_feature (363)..(364): n is a, c, g, or t
  misc_feature (366)..(367): n is a, c, g, or t
  misc_feature (369)..(369): n is a, c, g, or t
  misc_feature (372)..(372): n is a, c, g, or t
  misc_feature (377)..(377): n is a, c, g, or t
  misc_feature (380)..(380): n is a, c, g, or t
  misc_feature (390)..(390): n is a, c, g, or t
  misc_feature (396)..(396): n is a, c, g, or t
  misc_feature (405)..(405): n is a, c, g, or t
  misc_feature (426)..(426): n is a, c, g, or t
  misc_feature (434)..(435): n is a, c, g, or t
  misc_feature (437)..(437): n is a, c, g, or t
  misc_feature (439)..(439): n is a, c, g, or t
  misc_feature (441)..(441): n is a, c, g, or t
  misc_feature (443)..(443): n is a, c, g, or t
  misc_feature (457)..(457): n is a, c, g, or t
  misc_feature (476)..(476): n is a, c, g, or t
  misc_feature (525)..(525): n is a, c, g, or t
  misc_feature (527)..(527): n is a, c, g, or t
  misc_feature (538)..(538): n is a, c, g, or t

SEQ ID NO: 1214 - DNA, 66 bp, Mus musculus
tacgacaacttctttctccgactggggacttacacattcccaactggggcaaagtacactggaaat

SEQ ID NO: 1215 - DNA, 66 bp, Mus musculus; identical to SEQ ID NO: 1214

SEQ ID NO: 1216 - DNA, 66 bp, Mus musculus; identical to SEQ ID NO: 1214

SEQ ID NO: 1217 - DNA, 94 bp, Mus musculus
  misc_feature (31)..(32): n is a, c, g, or t
  misc_feature (41)..(41): n is a, c, g, or t
  misc_feature (43)..(43): n is a, c, g, or t
agagagcagtactacttcctactttcctatnnaagtatttntntgtatgttttatatacctcattctgacacctgtgtatgaactatggcaatt

SEQ ID NO: 1218 - DNA, 94 bp, Mus musculus; identical to SEQ ID NO: 1217
  misc_feature (31)..(32): n is a, c, g, or t
  misc_feature (41)..(41): n is a, c, g, or t
  misc_feature (43)..(43): n is a, c, g, or t

SEQ ID NO: 1219 - DNA, 50 bp, Mus musculus
tcgcacacctgacctgtggaagcttggttacactaagacacaggaaagct

SEQ ID NO: 1220 - DNA, 50 bp, Mus musculus; identical to SEQ ID NO: 1219

SEQ ID NO: 1221 - DNA, 326 bp, Mus musculus
  misc_feature (186)..(186): n is a, c, g, or t
  misc_feature (221)..(221): n is a, c, g, or t
  misc_feature (242)..(242): n is a, c, g, or t
  misc_feature (297)..(297): n is a, c, g, or t
tgtgaatgtgcagactctgaaaagctcattggacagtgctggctgcctatgttttctttccagcagccagctttttaaattacgtgtacagacaactatcggctgtgtgatgctaactataagcctacagtattagcattaagattaattattttatcttgatgttttcatatctaaagcaaaatnttaaggattttatttatctgccactatgctttaanatgcatgaataatttaaaagncaatatggagggggaaactttgttaatttatgagatgatttaagatgagagatgntcctgatacctatgtattttatccactgg

SEQ ID NO: 1222 - DNA, 326 bp, Mus musculus; identical to SEQ ID NO: 1221
  misc_feature (186)..(186): n is a, c, g, or t
  misc_feature (221)..(221): n is a, c, g, or t
  misc_feature (242)..(242): n is a, c, g, or t
  misc_feature (297)..(297): n is a, c, g, or t

SEQ ID NO: 1223 - DNA, 326 bp, Mus musculus; identical to SEQ ID NO: 1221
  misc_feature (186)..(186): n is a, c, g, or t
  misc_feature (221)..(221): n is a, c, g, or t
  misc_feature (242)..(242): n is a, c, g, or t
  misc_feature (297)..(297): n is a, c, g, or t

SEQ ID NO: 1224 - DNA, 141 bp, Mus musculus
  misc_feature (63)..(86): n is a, c, g, or t
ttccacgagttcatcgtgggcacctcccagttcagcgtcaagggtgatgaagagcagaagctnnnnnnnnnnnnnnnnnnnnnnnncatggataatgatggcttcatctccaatggggagctcttccaggtgcttaagatg

SEQ ID NO: 1225 - DNA, 141 bp, Mus musculus; identical to SEQ ID NO: 1224
  misc_feature (63)..(86): n is a, c, g, or t

SEQ ID NO: 1226 - DNA, 330 bp, Mus musculus
  misc_feature (284)..(284): n is a, c, g, or t
  misc_feature (286)..(286): n is a, c, g, or t
tcctgaaagtatgcatcatggtgagtttttaaacctagctaactaacctggggtagctcaggagggcctccttgtgttttgtttcaagcagctatgtttgaaacccaacagagctgtctgttccaaaactctctctagactggagtctcccaaaaccagcacacctgaaaaacccactttccagtgcttgccacttcctgtggtacagacgctatcataagagcaagcagtaagtgctcagggaacctggacgtagagctggagacaggtttgaatacagcttntntccaaaggtgtgtgctggaagcctggctcccagggtggtactgt

SEQ ID NO: 1227 - DNA, 330 bp, Mus musculus; identical to SEQ ID NO: 1226
  misc_feature (284)..(284): n is a, c, g, or t
  misc_feature (286)..(286): n is a, c, g, or t

SEQ ID NO: 1228 - DNA, 439 bp, Mus musculus
  misc_feature (55)..(55): n is a, c, g, or t
  misc_feature (210)..(210): n is a, c, g, or t
  misc_feature (283)..(284): n is a, c, g, or t
  misc_feature (294)..(294): n is a, c, g, or t
  misc_feature (298)..(298): n is a, c, g, or t
  misc_feature (303)..(303): n is a, c, g, or t
  misc_feature (316)..(317): n is a, c, g, or t
  misc_feature (326)..(327): n is a, c, g, or t
  misc_feature (335)..(335): n is a, c, g, or t
  misc_feature (340)..(340): n is a, c, g, or t
  misc_feature (342)..(342): n is a, c, g, or t
  misc_feature (345)..(346): n is a, c, g, or t
  misc_feature (380)..(380): n is a, c, g, or t
  misc_feature (394)..(394): n is a, c, g, or t
  misc_feature (396)..(396): n is a, c, g, or t
  misc_feature (405)..(405): n is a, c, g, or t
  misc_feature (407)..(407): n is a, c, g, or t
catctgtggcagaggctgggtccctgtgctgtgttcagtggacctgttttagccnagagcatcttccctgtgagaggatcctacaggctgagctgtcctgggcaagcagaacaggagaccctggcacggcccctggaaatgcattctcccaaccgggtggggctcaaggaagccagccccttggttgggccatagagcagtgtggcgacnggaaggccctagagccacctgacttacccctgctcagttctgcagagagcttcaggggctgagtgtgcgtcanntcagtccttntccnactgntgactcagttttnnccgcacagnnccgcctgntgggntnggnngcttccctgccctggtggaaccagtgtttgcatnttgcccacaggctngncctcacaantntgatgcggaaattcaatcatgaagctaagcaa

SEQ ID NO: 1229 - DNA, 439 bp, Mus musculus; identical to SEQ ID NO: 1228
  misc_feature (55)..(55): n is a, c, g, or t
  misc_feature (210)..(210): n is a, c, g, or t
  misc_feature (283)..(284): n is a, c, g, or t
  misc_feature (294)..(294): n is a, c, g, or t
  misc_feature (298)..(298): n is a, c, g, or t
  misc_feature (303)..(303): n is a, c, g, or t
  misc_feature (316)..(317): n is a, c, g, or t
  misc_feature (326)..(327): n is a, c, g, or t
  misc_feature (335)..(335): n is a, c, g, or t
  misc_feature (340)..(340): n is a, c, g, or t
  misc_feature (342)..(342): n is a, c, g, or t
  misc_feature (345)..(346): n is a, c, g, or t
  misc_feature (380)..(380): n is a, c, g, or t
  misc_feature (394)..(394): n is a, c, g, or t
  misc_feature (396)..(396): n is a, c, g, or t
  misc_feature (405)..(405): n is a, c, g, or t
  misc_feature (407)..(407): n is a, c, g, or t

SEQ ID NO: 1230 - DNA, 271 bp, Mus musculus
  misc_feature (99)..(99): n is a, c, g, or t
  misc_feature (108)..(108): n is a, c, g, or t
  misc_feature (134)..(134): n is a, c, g, or t
  misc_feature (162)..(162): n is a, c, g, or t
  misc_feature (196)..(196): n is a, c, g, or t
  misc_feature (203)..(203): n is a, c, g, or t
  misc_feature (206)..(206): n is a, c, g, or t
tgagtgcatttgtaccaatactgtgatgcagacctcataaggcatcctacaagactgcaaacccgaacctgttgtctgaactttgttgttttataaggnaacactagnaaaacaggacttaagcatttcctagntttatcaattaaaaaatttattgttagntacagacattttcaaagacatatgtcatatatgntgggtgnacntctgccatgctctcctctcccattagtcccctttgtcccctagacactttcatgtcacctgtatg

SEQ ID NO: 1231 - DNA, 271 bp, Mus musculus; identical to SEQ ID NO: 1230
  misc_feature (99)..(99): n is a, c, g, or t
  misc_feature (108)..(108): n is a, c, g, or t
  misc_feature (134)..(134): n is a, c, g, or t
  misc_feature (162)..(162): n is a, c, g, or t
  misc_feature (196)..(196): n is a, c, g, or t
  misc_feature (203)..(203): n is a, c, g, or t
  misc_feature (206)..(206): n is a, c, g, or t

SEQ ID NO: 1232 - DNA, 509 bp, Mus musculus
  misc_feature (52)..(52): n is a, c, g, or t
  misc_feature (65)..(65): n is a, c, g, or t
  misc_feature (137)..(138): n is a, c, g, or t
  misc_feature (147)..(172): n is a, c, g, or t
  misc_feature (470)..(484): n is a, c, g, or t
caggtgacttacttgggatttctgggtgattttgaaaactaatgtgtttttnaaagatgtaatancctttgactttgtaaaactctgtatgtcagtatgcattttattaccaaatacagaatgtggaggacctttannagtttttannnnnnnnnnnnnnnnnnnnnnnnnngatgtaaggcatgtgctctactttggaaggaaatagaaacaacaaagaacctcctgcccagacggctcacgaacatcccctccctctccctcaatgggccaaataatattggtgatttaaaatgttgatgaattcatttgttctatttttagcgtatttttagcattccagaatttgccagctctgttcacgtgatagagaaggcctccctggcttagattgtacctataacgtgtaggcgtcgtgtggtaggtaaaaagtgatcacaacacttgaaggtgtagagaaagaaagaacnnnnnnnnnnnnnnntgcgcttgtgtgagcgtttgatgcc

SEQ ID NO: 1233 - DNA, 509 bp, Mus musculus; identical to SEQ ID NO: 1232
  misc_feature (52)..(52): n is a, c, g, or t
  misc_feature (65)..(65): n is a, c, g, or t
  misc_feature (137)..(138): n is a, c, g, or t
  misc_feature (147)..(172): n is a, c, g, or t
  misc_feature (470)..(484): n is a, c, g, or t

SEQ ID NO: 1234 - DNA, 540 bp, Mus musculus
  misc_feature (31)..(31): n is a, c, g, or t
  misc_feature (276)..(277): n is a, c, g, or t
  misc_feature (286)..(286): n is a, c, g, or t
  misc_feature (289)..(289): n is a, c, g, or t
  misc_feature (305)..(305): n is a, c, g, or t
  misc_feature (312)..(312): n is a, c, g, or t
  misc_feature (316)..(316): n is a, c, g, or t
  misc_feature (318)..(318): n is a, c, g, or t
  misc_feature (322)..(322): n is a, c, g, or t
  misc_feature (325)..(325): n is a, c, g, or t
  misc_feature (342)..(342): n is a, c, g, or t
  misc_feature (486)..(508): n is a, c, g, or t
aggcgttcaagcaggcggccgactcagagcncctggctctgcaggccctcacggagaagcttctgcggtccgaggagtcctcctctcgtctcccagaggacatccggagactggaggaagagctacagcagctgaaggtcggggcccatgggtcagaggaaggtgccgtcttcaaagactccaaagccttagaggaactgcagaggcagattgagggcctgggtgccaggctccagtatgtagaggacggggtctactcaatgcaggtggcttctnnacgccacancgnaaagcctggagtcgcntcctgtncaananccangantacgagcaacgcctggntaatctgcaggagcacgtgggaaacctgggctcgtcatctgacctggccagcacagtcaggagcctcggggagacccagctggcgctgtccacgacttgaaggagctgaacagagctgggtgagctgcccgtaccgtgaatcannnnnnnnnnnnnnnnnnnnnnngcaagacaagcccagccgaagcttcctcttaa

SEQ ID NO: 1235 - DNA, 540 bp, Mus musculus; identical to SEQ ID NO: 1234
  misc_feature (31)..(31): n is a, c, g, or t
  misc_feature (276)..(277): n is a, c, g, or t
  misc_feature (286)..(286): n is a, c, g, or t
  misc_feature (289)..(289): n is a, c, g, or t
  misc_feature (305)..(305): n is a, c, g, or t
  misc_feature (312)..(312): n is a, c, g, or t
  misc_feature (316)..(316): n is a, c, g, or t
  misc_feature (318)..(318): n is a, c, g, or t
  misc_feature (322)..(322): n is a, c, g, or t
  misc_feature (325)..(325): n is a, c, g, or t
  misc_feature (342)..(342): n is a, c, g, or t
  misc_feature (486)..(508): n is a, c, g, or t

SEQ ID NO: 1236 - DNA, 502 bp, Mus musculus
  misc_feature (94)..(94): n is a, c, g, or t
  misc_feature (123)..(125): n is a, c, g, or t
  misc_feature (135)..(135): n is a, c, g, or t
  misc_feature (140)..(140): n is a, c, g, or t
  misc_feature (163)..(163): n is a, c, g, or t
  misc_feature (175)..(175): n is a, c, g, or t
  misc_feature (182)..(182): n is a, c, g, or t
  misc_feature (205)..(205): n is a, c, g, or t
  misc_feature (207)..(207): n is a, c, g, or t
  misc_feature (252)..(252): n is a, c, g, or t
  misc_feature (292)..(292): n is a, c, g, or t
  misc_feature (312)..(312): n is a, c, g, or t
  misc_feature (396)..(397): n is a, c, g, or t
  misc_feature (399)..(420): n is a, c, g, or t
  misc_feature (425)..(425): n is a, c, g, or t
tctgagcaggacatggaagacagtcaaagcgaggaatccattgtcccagatcgtcctctgagaagtcagtgatggcctccttattaactgctcnccatattgtagacagtaagctccggcctnnntcccggcagnttggntctgtctcaatattaggcaactnccgccattgccntcggcantgtcctaggttggcttatgccantnaccacagaaacctaccctagctcccagggtttacttcagaaatgntcttctggtattggagaccgccctgcatggtgacagtttntaggctccccaacctctgtntccctttaagagcacagcattgtcattttctttgatgaacaggtagggactgcactacccaaaatgtattttctatctccgaannannnnnnnnnnnnnnnnnnnnnngctgnacattattaagagaaggtatgaaggaaataaaaatgccctcatcctgggaaggagacttgaacttacttcagacaag

SEQ ID NO: 1237 - DNA, 502 bp, Mus musculus; identical to SEQ ID NO: 1236
  misc_feature (94)..(94): n is a, c, g, or t
  misc_feature (123)..(125): n is a, c, g, or t
  misc_feature (135)..(135): n is a, c, g, or t
  misc_feature (140)..(140): n is a, c, g, or t
  misc_feature (163)..(163): n is a, c, g, or t
  misc_feature (175)..(175): n is a, c, g, or t
  misc_feature (182)..(182): n is a, c, g, or t
  misc_feature (205)..(205): n is a, c, g, or t
  misc_feature (207)..(207): n is a, c, g, or t
  misc_feature (252)..(252): n is a, c, g, or t
  misc_feature (292)..(292): n is a, c, g, or t
  misc_feature (312)..(312): n is a, c, g, or t
  misc_feature (396)..(397): n is a, c, g, or t
  misc_feature (399)..(420): n is a, c, g, or t
  misc_feature (425)..(425): n is a, c, g, or t

SEQ ID NO: 1238 - DNA, 228 bp, Mus musculus
  misc_feature (45)..(45): n is a, c, g, or t
  misc_feature (134)..(134): n is a, c, g, or t
  misc_feature (154)..(154): n is a, c, g, or t
ttcctttgaaaaacagtttgcgaagtagaattttgtttctaaaantaaaagctaagttgaagtcctcacagagctggcccaatggtggcttaaagacaattccctcacatgccattagatggcagtagaggatntgagcgactgctggcctggntcctagtattatgagttagagacttttttgttttttattctgacctgaacattccgttgaagtgttagaatcca

SEQ ID NO: 1239 - DNA, 228 bp, Mus musculus; identical to SEQ ID NO: 1238
  misc_feature (45)..(45): n is a, c, g, or t
  misc_feature (134)..(134): n is a, c, g, or t
  misc_feature (154)..(154): n is a, c, g, or t

SEQ ID NO: 1240 - DNA, 127 bp, Mus musculus
tcgtcttgtcgctgcttcaaaatcaagaaggaatttttgctgtgttgaataatctgaagacccaagaacagctttaatttaaatcggtgacaaatagtaattgtctttcaaacactccgacagttgt

SEQ ID NO: 1241 - DNA, 127 bp, Mus musculus; identical to SEQ ID NO: 1240

SEQ ID NO: 1242 - DNA, 269 bp, Mus musculus
  misc_feature (32)..(36): n is a, c, g, or t
  misc_feature (39)..(40): n is a, c, g, or t
  misc_feature (42)..(43): n is a, c, g, or t
  misc_feature (46)..(47): n is a, c, g, or t
  misc_feature (49)..(49): n is a, c, g, or t
  misc_feature (54)..(61): n is a, c, g, or t
  misc_feature (66)..(66): n is a, c, g, or t
  misc_feature (68)..(68): n is a, c, g, or t
  misc_feature (71)..(73): n is a, c, g, or t
  misc_feature (78)..(84): n is a, c, g, or t
  misc_feature (89)..(90): n is a, c, g, or t
  misc_feature (94)..(96): n is a, c, g, or t
  misc_feature (98)..(98): n is a, c, g, or t
  misc_feature (102)..(102): n is a, c, g, or t
  misc_feature (104)..(104): n is a, c, g, or t
  misc_feature (106)..(107): n is a, c, g, or t
  misc_feature (136)..(136): n is a, c, g, or t
  misc_feature (149)..(149): n is a, c, g, or t
  misc_feature (158)..(158): n is a, c, g, or t
ctcacttttgaaataagaggaattcttttatnnnnnganntnnttnncnatatnnnnnnnntgtgntnccnnnggaannnnnnntcctnnaaannntntggntntnnttaatgaaaacgagacaggagacagtgtnttgtggaaagcantgattgctntcaatagaggagtgtcagtgaagtaccgctacttcagaggctgctttttagaaccaaaggtatgttttctttatatatttttttatttctgtaggactttgcatagtaaca

SEQ ID NO: 1243 - DNA, 269 bp, Mus musculus; identical to SEQ ID NO: 1242
  misc_feature (32)..(36): n is a, c, g, or t
  misc_feature (39)..(40): n is a, c, g, or t
  misc_feature (42)..(43): n is a, c, g, or t
  misc_feature (46)..(47): n is a, c, g, or t
  misc_feature (49)..(49): n is a, c, g, or t
  misc_feature (54)..(61): n is a, c, g, or t
  misc_feature (66)..(66): n is a, c, g, or t
  misc_feature (68)..(68): n is a, c, g, or t
  misc_feature (71)..(73): n is a, c, g, or t
  misc_feature (78)..(84): n is a, c, g, or t
  misc_feature (89)..(90): n is a, c, g, or t
  misc_feature (94)..(96): n is a, c, g, or t
  misc_feature (98)..(98): n is a, c, g, or t
  misc_feature (102)..(102): n is a, c, g, or t
  misc_feature (104)..(104): n is a, c, g, or t
  misc_feature (106)..(107): n is a, c, g, or t
  misc_feature (136)..(136): n is a, c, g, or t
  misc_feature (149)..(149): n is a, c, g, or t
  misc_feature (158)..(158): n is a, c, g, or t

SEQ ID NO: 1244 - DNA, 269 bp, Mus musculus; identical to SEQ ID NO: 1242
  misc_feature (32)..(36): n is a, c, g, or t
  misc_feature (39)..(40): n is a, c, g, or t
  misc_feature (42)..(43): n is a, c, g, or t
  misc_feature (46)..(47): n is a, c, g, or t
  misc_feature (49)..(49): n is a, c, g, or t
  misc_feature (54)..(61): n is a, c, g, or t
  misc_feature (66)..(66): n is a, c, g, or t
  misc_feature (68)..(68): n is a, c, g, or t
  misc_feature (71)..(73): n is a, c, g, or t
  misc_feature (78)..(84): n is a, c, g, or t
  misc_feature (89)..(90): n is a, c, g, or t
  misc_feature (94)..(96): n is a, c, g, or t
  misc_feature (98)..(98): n is a, c, g, or t
  misc_feature (102)..(102): n is a, c, g, or t
  misc_feature (104)..(104): n is a, c, g, or t
  misc_feature (106)..(107): n is a, c, g, or t
  misc_feature (136)..(136): n is a, c, g, or t
  misc_feature (149)..(149): n is a, c, g, or t
  misc_feature (158)..(158): n is a, c, g, or t

SEQ ID NO: 1245 - DNA, 479 bp, Mus musculus
  misc_feature (31)..(31): n is a, c, g, or t
  misc_feature (66)..(66): n is a, c, g, or t
  misc_feature (78)..(78): n is a, c, g, or t
  misc_feature (80)..(80): n is a, c, g, or t
  misc_feature (91)..(91): n is a, c, g, or t
  misc_feature (99)..(99): n is a, c, g, or t
  misc_feature (156)..(156): n is a, c, g, or t
  misc_feature (214)..(214): n is a, c, g, or t
  misc_feature (231)..(231): n is a, c, g, or t
  misc_feature (265)..(298): n is a, c, g, or t
  misc_feature (398)..(398): n is a, c, g, or t
tggaggattcagacccgattagtggagtacntctgatccaaccatgaccaggtgggctagagttantacttcaaatantnagcgacccctntcagcaanatcatgggaggacatgaagaaggggtctgtggagagagcagaccaaagccttccaantcgtaagcagtgtcaaagcagtaggctgccccttagaaatgactcacctcaagcaaanacgcaaaaagaacaaanagaaaaaagagtacttgaatgaagacgtgaacgnnnnnnnnnnnnnnnnnnnnnnnnnnnnnnnnnnacttcacaatggacagctgatagcagctgacagccaggaagtgagggaagaaattgccgtggccttaaagaaggacagtcgacgggaaggaaggcggctnaagagacaggcggcaaagaagaatgcaatggtgcgctcatgactgtatgttgctaccttctttgtgcaactagaaagtgtt

SEQ ID NO: 1246 - DNA, 479 bp, Mus musculus; identical to SEQ ID NO: 1245
  misc_feature (31)..(31): n is a, c, g, or t
  misc_feature (66)..(66): n is a, c, g, or t
  misc_feature (78)..(78): n is a, c, g, or t
  misc_feature (80)..(80): n is a, c, g, or t
  misc_feature (91)..(91): n is a, c, g, or t
  misc_feature (99)..(99): n is a, c, g, or t
  misc_feature (156)..(156): n is a, c, g, or t
  misc_feature (214)..(214): n is a, c, g, or t
  misc_feature (231)..(231): n is a, c, g, or t
  misc_feature (265)..(298): n is a, c, g, or t
  misc_feature (398)..(398): n is a, c, g, or t

SEQ ID NO: 1247 - DNA, 271 bp, Mus musculus
gcagcagctgtagctaaaattgtaaagcctggcatgaaattaactgagctatataatgcttatgtggaaactcaggatcagttgcttttggaaaaacaagaaaataagaggattaataagtatctggatgagatagtaaaagaagtggaagccaaagcaccgattttgaaacgccagcgcgaagagtatgagcgtgcacagaaagctgtggccagtctttctgcaaagcttgagcaagctatgaaggagattcagcgattgcaggaggaca

SEQ ID NO: 1248 - DNA, 271 bp, Mus musculus; identical to SEQ ID NO: 1247

SEQ ID NO: 1249 - DNA, 271 bp, Mus musculus; identical to SEQ ID NO: 1247

SEQ ID NO: 1250 - DNA, 291 bp, Mus musculus
  misc_feature (50)..(50): n is a, c, g, or t
  misc_feature (116)..(141): n is a, c, g, or t
tgacacggtgaaatgcgtcaaagaccgagactcggaggccacagcgaggnagcacagtgactgcagtagggagagctcagccagtgagcaggacaacactctgctccaacagtatnnnnnnnnnnnnnnnnnnnnnnnnnntgccgcagaggcggccgattctgacgatgtggcaggagacggtaagcgtcacctcgcttgttctccggaaaggtttgacgcctcctctgacagtgagactcatagagtggcctctacttcacaggatgaaattagccagacgccagagaa

SEQ ID NO: 1251 - DNA, 291 bp, Mus musculus; identical to SEQ ID NO: 1250
  misc_feature (50)..(50): n is a, c, g, or t
  misc_feature (116)..(141): n is a, c, g, or t

SEQ ID NO: 1252 - DNA, 291 bp, Mus musculus; identical to SEQ ID NO: 1250
  misc_feature (50)..(50): n is a, c, g, or t
  misc_feature (116)..(141): n is a, c, g, or t

SEQ ID NO: 1253 - DNA, 505 bp, Mus musculus
  misc_feature (41)..(41): n is a, c, g, or t
  misc_feature (45)..(45): n is a, c, g, or t
  misc_feature (187)..(187): n is a, c, g, or t
  misc_feature (355)..(370): n is a, c, g, or t
  misc_feature (462)..(462): n is a, c, g, or t
  misc_feature (470)..(470): n is a, c, g, or t
  misc_feature (474)..(474): n is a, c, g, or t
  misc_feature (480)..(480): n is a, c, g, or t
gtttgacacctttttctagctttgatttctccattgctttnttantcttgtatttgatttctagcacatgtgatgttcacttccatattttgcactgcttatatttacgtgcaatcttattccttgtccgcacacagatgtggaaagctagaaataaatgtaaaagcttaattttttataaacattnaaatatgtaatttggacatgatttgttacttaaggttctttaaactggaagtgaagtgcatgccttctgaagatgttctggctttattctgtaataagtatttacattggaaaataccaatttcgctatacagttttttttccacacacccattttaccttttgcttnnnnnnnnnnnnnnnnagggttaatgtcacgctaattaataaaacttttgggttcaaatcaagtgttcccacaagggtaagaacagtattctttgactcttaaaaagncctttctnagancctgtnctcaaaacagctttattaggcctgt

SEQ ID NO: 1254 - DNA, 505 bp, Mus musculus; identical to SEQ ID NO: 1253
  misc_feature (41)..(41): n is a, c, g, or t
  misc_feature (45)..(45): n is a, c, g, or t
  misc_feature (187)..(187): n is a, c, g, or t
  misc_feature (355)..(370): n is a, c, g, or t
  misc_feature (462)..(462): n is a, c, g, or t
  misc_feature (470)..(470): n is a, c, g, or t
  misc_feature (474)..(474): n is a, c, g, or t
  misc_feature (480)..(480): n is a, c, g, or t

SEQ ID NO: 1255 - DNA, 136 bp, Mus musculus
tctcctcctgtgtccttttgataagttaacatgtgcatcacatcatctatatataagatattcagattcacttgatcttccataagttcctggttcctcttttccatgttaacttcactgtacataaatggatggg

SEQ ID NO: 1256 - DNA, 136 bp, Mus musculus; identical to SEQ ID NO: 1255

SEQ ID NO: 1257 - DNA, 136 bp, Mus musculus; identical to SEQ ID NO: 1255

SEQ ID NO: 1258 - DNA, 204 bp, Mus musculus
  misc_feature (31)..(47): n is a, c, g, or t
  misc_feature (65)..(65): n is a, c, g, or t
  misc_feature (92)..(92): n is a, c, g, or t
tgagacttcgtgtgccctttaagaagctccnnnnnnnnnnnnnnnnncacgtcttggccccagcntaagcatcaggcagaagtcccattggnctgaatgagagggttccttcctggcagctatttagctttccctggaggacagttatgggaccagctcagctcctcttggcttgatagctgccctaagggtgacaataatggg

SEQ ID NO: 1259 - DNA, 204 bp, Mus musculus; identical to SEQ ID NO: 1258
  misc_feature (31)..(47): n is a, c, g, or t
  misc_feature (65)..(65): n is a, c, g, or t
  misc_feature (92)..(92): n is a, c, g, or t

SEQ ID NO: 1260 - DNA, 204 bp, Mus musculus; identical to SEQ ID NO: 1258
  misc_feature (31)..(47): n is a, c, g, or t
  misc_feature (65)..(65): n is a, c, g, or t
  misc_feature (92)..(92): n is a, c, g, or t

SEQ ID NO: 1261 - DNA, 448 bp, Mus musculus
  misc_feature (91)..(123): n is a, c, g, or t
  misc_feature (167)..(181): n is a, c, g, or t
  misc_feature (183)..(184): n is a, c, g, or t
  misc_feature (186)..(186): n is a, c, g, or t
  misc_feature (188)..(194): n is a, c, g, or t
  misc_feature (196)..(198): n is a, c, g, or t
  misc_feature (200)..(201): n is a, c, g, or t
  misc_feature (203)..(204): n is a, c, g, or t
  misc_feature (206)..(206): n is a, c, g, or t
  misc_feature (209)..(209): n is a, c, g, or t
  misc_feature (211)..(211): n is a, c, g, or t
  misc_feature (218)..(218): n is a, c, g, or t
  misc_feature (221)..(221): n is a, c, g, or t
  misc_feature (224)..(238): n is a, c, g, or t
  misc_feature (240)..(240): n is a, c, g, or t
  misc_feature (243)..(243): n is a, c, g, or t
  misc_feature (245)..(245): n is a, c, g, or t
  misc_feature (255)..(255): n is a, c, g, or t
  misc_feature (292)..(292): n is a, c, g, or t
  misc_feature (312)..(312): n is a, c, g, or t
  misc_feature (314)..(314): n is a, c, g, or t
  misc_feature (359)..(359): n is a, c, g, or t
accactggtagagagaggcaaacactacagtcctgatgcaggagaatggggtgggtgtggggtgacctggagttacggcttccactttggnnnnnnnnnnnnnnnnnnnnnnnnnnnnnnnnntcactgtccccctgggaagtccagccctagcaccttcccaacannnnnnnnnnnnnnntnntncnnnnnnntnnntnntnnangantntaagttnttntcnnnnnnnnnnnnnnngntcntnttccctgggnaatacgtgggccctgagctggacttatattttatatntacaaataaatcacatttantnttatatttagggagagctgggtggcaacaataggttttttttttnaaaaaaaaaaaaaatttgcgcagctcccagagtttatttattttctgacttcaagtgagccagttatctgccttgagtattttgtagac

SEQ ID NO: 1262 - DNA, 448 bp, Mus musculus; identical to SEQ ID NO: 1261
  misc_feature (91)..(123): n is a, c, g, or t
  misc_feature (167)..(181): n is a, c, g, or t
  misc_feature (183)..(184): n is a, c, g, or t
  misc_feature (186)..(186): n is a, c, g, or t
  misc_feature (188)..(194): n is a, c, g, or t
  misc_feature (196)..(198): n is a, c, g, or t
  misc_feature (200)..(201): n is a, c, g, or t
  misc_feature (203)..(204): n is a, c, g, or t
  misc_feature (206)..(206): n is a, c, g, or t
  misc_feature (209)..(209): n is a, c, g, or t
  misc_feature (211)..(211): n is a, c, g, or t
  misc_feature (218)..(218): n is a, c, g, or t
  misc_feature (221)..(221): n is a, c, g, or t
  misc_feature (224)..(238): n is a, c, g, or t
  misc_feature (240)..(240): n is a, c, g, or t
  misc_feature (243)..(243): n is a, c, g, or t
  misc_feature (245)..(245): n is a, c, g, or t
  misc_feature (255)..(255): n is a, c, g, or t
  misc_feature (292)..(292): n is a, c, g, or t
  misc_feature (312)..(312): n is a, c, g, or t
  misc_feature (314)..(314): n is a, c, g, or t
  misc_feature (359)..(359): n is a, c, g, or t

SEQ ID NO: 1263 - DNA, 340 bp, Mus musculus
  misc_feature (40)..(40): n is a, c, g, or t
  misc_feature (81)..(81): n is a, c, g, or t
  misc_feature (97)..(97): n is a, c, g, or t
  misc_feature (103)..(103): n is a, c, g, or t
  misc_feature (274)..(274): n is a, c, g, or t
  misc_feature (276)..(276): n is a, c, g, or t
  misc_feature (278)..(278): n is a, c, g, or t
  misc_feature (283)..(283): n is a, c, g, or t
aagtgagccaattcggggccttcttctcccacattaggcntggccaagaagtcaagggaacacaggtttttcctcttcctnatggagtgtaaaagcnttcctnttcgcttagaaccctagttaagagttctctacatagtctgcttttctcagtgaagaccttgtgttaatatttctctgcagagtgtgatgcccaaggtgccaaatccctggctccagagtcccgtcgtaggaaaccccgtacagaaaaaccgctcaccgtatttcagggatntncngactncccgggaaaaaggatcgaaagaggaccctttggagatgacccggttttagagccgag

SEQ ID NO: 1264 - DNA, 340 bp, Mus musculus; identical to SEQ ID NO: 1263
  misc_feature (40)..(40): n is a, c, g, or t
  misc_feature (81)..(81): n is a, c, g, or t
  misc_feature (97)..(97): n is a, c, g, or t
  misc_feature (103)..(103): n is a, c, g, or t
  misc_feature (274)..(274): n is a, c, g, or t
  misc_feature (276)..(276): n is a, c, g, or t
  misc_feature (278)..(278): n is a, c, g, or t
  misc_feature (283)..(283): n is a, c, g, or t

SEQ ID NO: 1265 - DNA, 340 bp, Mus musculus; identical to SEQ ID NO: 1263
  misc_feature (40)..(40): n is a, c, g, or t
  misc_feature (81)..(81): n is a, c, g, or t
  misc_feature (97)..(97): n is a, c, g, or t
  misc_feature (103)..(103): n is a, c, g, or t
  misc_feature (274)..(274): n is a, c, g, or t
  misc_feature (276)..(276): n is a, c, g, or t
  misc_feature (278)..(278): n is a, c, g, or t
  misc_feature (283)..(283): n is a, c, g, or t

SEQ ID NO: 1266 - DNA, 418 bp, Mus musculus
  misc_feature (41)..(41): n is a, c, g, or t
  misc_feature (69)..(69): n is a, c, g, or t
  misc_feature (84)..(84): n is a, c, g, or t
  misc_feature (138)..(138): n is a, c, g, or t
  misc_feature (152)..(153): n is a, c, g, or t
  misc_feature (156)..(156): n is a, c, g, or t
  misc_feature (161)..(161): n is a, c, g, or t
  misc_feature (165)..(165): n is a, c, g, or t
  misc_feature (180)..(180): n is a, c, g, or t
  misc_feature (188)..(188): n is a, c, g, or t
  misc_feature (205)..(205): n is a, c, g, or t
  misc_feature (208)..(224): n is a, c, g, or t
  misc_feature (246)..(246): n is a, c, g, or t
  misc_feature (302)..(302): n is a, c, g, or t
tcctgattgacttgttatgtctagttttgccctcagctttntgatatgatttaataagaattgctgatntctaggtaaaccttnttagtatttaaagtagttaagactgacttttatataaaagttcagatttgtgantcattggagatttnngtntgacnactnttaaagataaacacnataattantccttccttcgtaagtncannnnnnnnnnnnnnnnnaagaggagctggctgagaaaantcctttgcttactcacactttttaaatctataaaaagttgcttagttatgaatgcncatgggttcttgggaatactttcttttatttacctgtactataaaatgttatttcttgtaaagatattatataacatcctggaaattttttcatagtcagtcactagaaggaaaat

SEQ ID NO: 1267 - DNA, 418 bp, Mus musculus; identical to SEQ ID NO: 1266
  misc_feature (41)..(41): n is a, c, g, or t
  misc_feature (69)..(69): n is a, c, g, or t
  misc_feature (84)..(84): n is a, c, g, or t
  misc_feature (138)..(138): n is a, c, g, or t
  misc_feature (152)..(153): n is a, c, g, or t
  misc_feature (156)..(156): n is a, c, g, or t
  misc_feature (161)..(161): n is a, c, g, or t
  misc_feature (165)..(165): n is a, c, g, or t
  misc_feature (180)..(180): n is a, c, g, or t
  misc_feature (188)..(188): n is a, c, g, or t
  misc_feature (205)..(205): n is a, c, g, or t
  misc_feature (208)..(224): n is a, c, g, or t
  misc_feature (246)..(246): n is a, c, g, or t
  misc_feature (302)..(302): n is a, c, g, or t

SEQ ID NO: 1268 - DNA, 373 bp, Mus musculus
  misc_feature (71)..(71): n is a, c, g, or t
  misc_feature (115)..(115): n is a, c, g, or t
  misc_feature (126)..(126): n is a, c, g, or t
  misc_feature (149)..(149): n is a, c, g, or t
  misc_feature (196)..(197): n is a, c, g, or t
  misc_feature (202)..(202): n is a, c, g, or t
  misc_feature (206)..(206): n is a, c, g, or t
  misc_feature (218)..(218): n is a, c, g, or t
  misc_feature (257)..(257): n is a, c, g, or t
  misc_feature (293)..(293): n is a, c, g, or t
  misc_feature (306)..(306): n is a, c, g, or t
agtggaatacattgtcggtgtcacggaccttgacgggttcacctaaaacattgtactttactctgagctanatatttatttcaacggatcatttcacatttaccccgttgatatncagttaattancagtgatactgtgggggaaaacngggttagataaacaagttggaaaaatgcagtgtgatgttgtaatctnnacaantgcnttatgtttattnctaagaactggtgttatcaacccttttactaagaagggnccctcggcctgtattcatgtaggaaagtgaagagcnttctgttttcttnatagtcacttactgtcatgtctcattgaaagttacaatctgacgagcttagtttacttagctttaat

SEQ ID NO: 1269 - DNA, 373 bp, Mus musculus; identical to SEQ ID NO: 1268
  misc_feature (71)..(71): n is a, c, g, or t
  misc_feature (115)..(115): n is a, c, g, or t
  misc_feature (126)..(126): n is a, c, g, or t
  misc_feature (149)..(149): n is a, c, g, or t
  misc_feature (196)..(197): n is a, c, g, or t
  misc_feature (202)..(202): n is a, c, g, or t
  misc_feature (206)..(206): n is a, c, g, or t
  misc_feature (218)..(218): n is a, c, g, or t
  misc_feature (257)..(257): n is a, c, g, or t
  misc_feature (293)..(293): n is a, c, g, or t
  misc_feature (306)..(306): n is a, c, g, or t

SEQ ID NO: 1270 - DNA, 373 bp, Mus musculus; identical to SEQ ID NO: 1268
  misc_feature (71)..(71): n is a, c, g, or t
  misc_feature (115)..(115): n is a, c, g, or t
  misc_feature (126)..(126): n is a, c, g, or t
  misc_feature (149)..(149): n is a, c, g, or t
  misc_feature (196)..(197): n is a, c, g, or t
  misc_feature (202)..(202): n is a, c, g, or t
  misc_feature (206)..(206): n is a, c, g, or t
  misc_feature (218)..(218): n is a, c, g, or t
  misc_feature (257)..(257): n is a, c, g, or t
  misc_feature (293)..(293): n is a, c, g, or t
  misc_feature (306)..(306): n is a, c, g, or t

SEQ ID NO: 1271 - DNA, 422 bp, Mus musculus
  misc_feature (212)..(212): n is a, c, g, or t
  misc_feature (219)..(219): n is a, c, g, or t
  misc_feature (224)..(224): n is a, c, g, or t
  misc_feature (248)..(248): n is a, c, g, or t
  misc_feature (293)..(293): n is a, c, g, or t
  misc_feature (296)..(296): n is a, c, g, or t
  misc_feature (302)..(302): n is a, c, g, or t
  misc_feature (304)..(304): n is a, c, g, or t
  misc_feature (318)..(318): n is a, c, g, or t
aatcacattgcaatcgaagcagtgctgcattccagtgattaaaatcaattgtgcaggatgttcaagaggttagaaataactacctttatagagatgtcatttagaaatttagcgtgatgaaaatattcatgtttatactgggagaatgatttttgtaaagagtgaaaatatgatttcttaagattacagacagaaatgtgtcttaatggctnaagaggnaaatnagatactatgaaaaacatttttcngtatttttacaaagaatgttctgttgattccctggtttattcctnaancaaatnanatccacattttctntagttcatgtcatttgtgatttgcttatatgcctgagaatatgaatggaatgagactaaaattagaagctttggtggggtggcatgtcatggtctggcattgga

SEQ ID NO: 1272 - DNA, 422 bp, Mus musculus; identical to SEQ ID NO: 1271
  misc_feature (212)..(212): n is a, c, g, or t
  misc_feature (219)..(219): n is a, c, g, or t
  misc_feature (224)..(224): n is a, c, g, or t
  misc_feature (248)..(248): n is a, c, g, or t
  misc_feature (293)..(293): n is a, c, g, or t
  misc_feature (296)..(296): n is a, c, g, or t
  misc_feature (302)..(302): n is a, c, g, or t
  misc_feature (304)..(304): n is a, c, g, or t
  misc_feature (318)..(318): n is a, c, g, or t

SEQ ID NO: 1273 - DNA, 141 bp, Mus musculus
tactttccactgagccaggaacccgctagaataatagtaaatgacagaagtgggatgggaaagtggacagcgctttgacaaaaaggaacctctgtaaatagctcactcgctcatgtgcgtcctccgggtcatctctgtctt

SEQ ID NO: 1274 - DNA, 141 bp, Mus musculus; identical to SEQ ID NO: 1273

SEQ ID NO: 1275 - DNA, 518 bp, Mus musculus
  misc_feature (35)..(35): n is a, c, g, or t
  misc_feature (40)..(40): n is a, c, g, or t
  misc_feature (45)..(45): n is a, c, g, or t
  misc_feature (56)..(56): n is a, c, g, or t
  misc_feature (64)..(64): n is a, c, g, or t
  misc_feature (81)..(81): n is a, c, g, or t
  misc_feature (90)..(90): n is a, c, g, or t
  misc_feature (227)..(227): n is a, c, g, or t
  misc_feature (301)..(301): n is a, c, g, or t
  misc_feature (370)..(370): n is a, c, g, or t
tgatggacctggaaatgcagttcaggaaatcatgnttccngccancaaagcaggantagttatnggaaaggggggcgagantattaaacnacttcaggaacgggctggtgttaaaatggtaatgattcaagatgggcctcaaaacactggtgctgataaacctcttaggattacgggtgacccatacaaagttcagcaagccaaggaaatggtattagagttaattngtgatcaaggtggtttcagagaagtgcggaatgagtatggctcaagaataggaggcaatgaagggatagatgtnccaattccaagatttgctgttggcattgtaataggaagaaatggagaaatgattaaaaaaatacaaaantgatgctggtgttcgaattcagtttaagccagatgatggaacaacacctgataggatagcacagataacaggacctccagacaggtgtcagcacgctgcagaaataatcacagaccttctacgaagtgttcaggctggcaatcctggt

SEQ ID NO: 1276 - DNA, 518 bp, Mus musculus; identical to SEQ ID NO: 1275
  misc_feature (35)..(35): n is a, c, g, or t
  misc_feature (40)..(40): n is a, c, g, or t
  misc_feature (45)..(45): n is a, c, g, or t
  misc_feature (56)..(56): n is a, c, g, or t
  misc_feature (64)..(64): n is a, c, g, or t
  misc_feature (81)..(81): n is a, c, g, or t
  misc_feature (90)..(90): n is a, c, g, or t
  misc_feature (227)..(227): n is a, c, g, or t
  misc_feature (301)..(301): n is a, c, g, or t
  misc_feature (370)..(370): n is a, c, g, or t

SEQ ID NO: 1277 - DNA, 390 bp, Mus musculus
  misc_feature (204)..(204): n is a, c, g, or t
  misc_feature (207)..(210): n is a, c, g, or t
  misc_feature (215)..(215): n is a, c, g, or t
  misc_feature (219)..(219): n is a, c, g, or t
  misc_feature (228)..(228): n is a, c, g, or t
  misc_feature (232)..(233): n is a, c, g, or t
  misc_feature (251)..(251): n is a, c, g, or t
  misc_feature (259)..(259): n is a, c, g, or t
  misc_feature (273)..(273): n is a, c, g, or t
  misc_feature (278)..(278): n is a, c, g, or t
  misc_feature (292)..(292): n is a, c, g, or t
  misc_feature (334)..(334): n is a, c, g, or t
gtcattagaggcatcctgaaggatcaagagcaaaattaaattcatgtgtctcatgaaaagaacattgtcttaacagagtgttgataaaatgtctttccctcttggcttgaatatttgcatgatgtgtgaggcataggactcgctcatgattccacatcccaccaaagattctattttcagtcacttaatgatttccaaagcagngannnngagcngggntggggggantcanngacattcaggacatgttntaacaacnaaatgacacatttntcaantatttctttgtgantcaactaaattttacccaccctgtatgatacaattatttgtntgaacaacttataagtgttttatctcaatgagagtgaaactatacacttcacctag

SEQ ID NO: 1278 - DNA, 390 bp, Mus musculus; identical to SEQ ID NO: 1277
  misc_feature (204)..(204): n is a, c, g, or t
  misc_feature (207)..(210): n is a, c, g, or t
  misc_feature (215)..(215): n is a, c, g, or t
  misc_feature (219)..(219): n is a, c, g, or t
  misc_feature (228)..(228): n is a, c, g, or t
  misc_feature (232)..(233): n is a, c, g, or t
  misc_feature (251)..(251): n is a, c, g, or t
  misc_feature (259)..(259): n is a, c, g, or t
  misc_feature (273)..(273): n is a, c, g, or t
  misc_feature (278)..(278): n is a, c, g, or t
  misc_feature (292)..(292): n is a, c, g, or t
  misc_feature (334)..(334): n is a, c, g, or t

SEQ ID NO: 1279 - DNA, 390 bp, Mus musculus; identical to SEQ ID NO: 1277
  misc_feature (204)..(204): n is a, c, g, or t
  misc_feature (207)..(210): n is a, c, g, or t
  misc_feature (215)..(215): n is a, c, g, or t
  misc_feature (219)..(219): n is a, c, g, or t
  misc_feature (228)..(228): n is a, c, g, or t
  misc_feature (232)..(233): n is a, c, g, or t
  misc_feature (251)..(251): n is a, c, g, or t
  misc_feature (259)..(259): n is a, c, g, or t
  misc_feature (273)..(273): n is a, c, g, or t
  misc_feature (278)..(278): n is a, c, g, or t
  misc_feature (292)..(292): n is a, c, g, or t
  misc_feature (334)..(334): n is a, c, g, or t

SEQ ID NO: 1280 - DNA, 203 bp, Mus musculus
  misc_feature (63)..(63): n is a, c, g, or t
  misc_feature (76)..(76): n is a, c, g, or t
  misc_feature (84)..(85): n is a, c, g, or t
  misc_feature (108)..(108): n is a, c, g, or t
tttacctttcttgagacccaccaggccttccgctcactccgcaccaagtgggatatttcaggnaacagagctacantggcaccnnacaaaaaacaagatgttgggaantttgtggagcttccaggtgcagagatgggaaaggtgacattcagattccccccagaggctagtggttacttacacattgggcatgcgaaagctgt

SEQ ID NO: 1281 - DNA, 203 bp, Mus musculus; identical to SEQ ID NO: 1280
  misc_feature (63)..(63): n is a, c, g, or t
  misc_feature (76)..(76): n is a, c, g, or t
  misc_feature (84)..(85): n is a, c, g, or t
  misc_feature (108)..(108): n is a, c, g, or t

SEQ ID NO: 1282 - DNA, 203 bp, Mus musculus; identical to SEQ ID NO: 1280
  misc_feature (63)..(63): n is a, c, g, or t
  misc_feature (76)..(76): n is a, c, g, or t
  misc_feature (84)..(85): n is a, c, g, or t
  misc_feature (108)..(108): n is a, c, g, or t

SEQ ID NO: 1283 - DNA, 334 bp, Mus musculus
  misc_feature (181)..(184): n is a, c, g, or t
  misc_feature (186)..(192): n is a, c, g, or t
  misc_feature (307)..(307): n is a, c, g, or t
aaactgcaggtggataatgcctccttacttcaggcagatgagattcaggctattgaagaagcagatgaagaggaagaacaaatgtttgaatgagaagagaactcatgctgaaggagcctggggtgctgttcccagggtcattacctaatgctcactgtactgattctcaactgaccattcnnnngnnnnnnngccttaatactgtgagaggatcctggctaccctggcagttctcactcctaagcactttcattacaaacaagaaactgattcttagagcttgctgcagttgactcatgctgcaaanccttcctcaaagccttcactggtgtgt

SEQ ID NO: 1284 - DNA, 334 bp, Mus musculus; identical to SEQ ID NO: 1283
  misc_feature (181)..(184): n is a, c, g, or t
  misc_feature (186)..(192): n is a, c, g, or t
  misc_feature (307)..(307): n is a, c, g, or t

SEQ ID NO: 1285 - DNA, 155 bp, Mus musculus
  misc_feature (53)..(54): n is a, c, g, or t
  misc_feature (56)..(56): n is a, c, g, or t
  misc_feature (58)..(59): n is a, c, g, or t
  misc_feature (61)..(69): n is a, c, g, or t
  misc_feature (72)..(73): n is a, c, g, or t
  misc_feature (90)..(90): n is a, c, g, or t
  misc_feature (93)..(93): n is a, c, g, or t
  misc_feature (98)..(98): n is a, c, g, or t
atcccacacacatttaaggttcggccccttaggcaaaatttttttccaaaaanngngnngnnnnnnnnnggnntgggaatggagtttcanttntcaantccttgactggcgcatgcaggattctgggttcaatccagctgcgagaaataaagcac

SEQ ID NO: 1286 - DNA, 155 bp, Mus musculus; identical to SEQ ID NO: 1285
  misc_feature (53)..(54): n is a, c, g, or t
  misc_feature (56)..(56): n is a, c, g, or t
  misc_feature (58)..(59): n is a, c, g, or t
  misc_feature (61)..(69): n is a, c, g, or t
  misc_feature (72)..(73): n is a, c, g, or t
  misc_feature (90)..(90): n is a, c, g, or t
  misc_feature (93)..(93): n is a, c, g, or t
  misc_feature (98)..(98): n is a, c, g, or t

SEQ ID NO: 1287 - DNA, 155 bp, Mus musculus; identical to SEQ ID NO: 1285
  misc_feature (53)..(54): n is a, c, g, or t
  misc_feature (56)..(56): n is a, c, g, or t
  misc_feature (58)..(59): n is a, c, g, or t
  misc_feature (61)..(69): n is a, c, g, or t
  misc_feature (72)..(73): n is a, c, g, or t
  misc_feature (90)..(90): n is a, c, g, or t
  misc_feature (93)..(93): n is a, c, g, or t
  misc_feature (98)..(98): n is a, c, g, or t

SEQ ID NO: 1288 - DNA, 191 bp, Mus musculus
cccgcaaatatacaaggattggcgcggaaatctcagttcccctcctgtaaaaccctggggattcctgtgtgccccttgttttctggtgctgagttcccacctgattccaggatgcttaatcaaactgaacggtcggtgcttcttattttagctttaccccagccccctgctcccatttcctctgtgtaatg

SEQ ID NO: 1289 - DNA, 191 bp, Mus musculus; identical to SEQ ID NO: 1288

SEQ ID NO: 1290 - DNA, 191 bp, Mus musculus; identical to SEQ ID NO: 1288

SEQ ID NO: 1291 - DNA, 49 bp, Mus musculus
tagactgcccagaattttccctatgtgcccatgtttattacagttgggg

SEQ ID NO: 1292 - DNA, 49 bp, Mus musculus; identical to SEQ ID NO: 1291

SEQ ID NO: 1293 - DNA, 49 bp, Mus musculus; identical to SEQ ID NO: 1291

SEQ ID NO: 1294 - DNA, 41 bp, Mus musculus
tttaatgatatatctttccaatgtatcccactatagaagtt

SEQ ID NO: 1295 - DNA, 41 bp, Mus musculus; identical to SEQ ID NO: 1294

SEQ ID NO: 1296 - DNA, 41 bp, Mus musculus; identical to SEQ ID NO: 1294

SEQ ID NO: 1297 - DNA, 38 bp, Mus musculus
ttccctaaggcctcctgcctagtgttccgagaaacttt

SEQ ID NO: 1298 - DNA, 38 bp, Mus musculus; identical to SEQ ID NO: 1297

SEQ ID NO: 1299 - DNA, 38 bp, Mus musculus; identical to SEQ ID NO: 1297

SEQ ID NO: 1300 - DNA, 40 bp, Mus musculus
tcgaaccaaagtgggccctggagactccttcttcgacctg

SEQ ID NO: 1301 - DNA, 40 bp, Mus musculus; identical to SEQ ID NO: 1300

SEQ ID NO: 1302 - DNA, 40 bp, Mus musculus; identical to SEQ ID NO: 1300

SEQ ID NO: 1303 - DNA, 39 bp, Mus musculus
agagtagtaggcaccacatgtaagtcagggtcaaatact

SEQ ID NO: 1304 - DNA, 39 bp, Mus musculus; identical to SEQ ID NO: 1303

SEQ ID NO: 1305 - DNA, 39 bp, Mus musculus; identical to SEQ ID NO: 1303

SEQ ID NO: 1306 - DNA, 58 bp, Mus musculus
cattacccattgctctccctgccttctacccgataatacactcactcccatttccatt

SEQ ID NO: 1307 - DNA, 58 bp, Mus musculus; identical to SEQ ID NO: 1306

SEQ ID NO: 1308 - DNA, 58 bp, Mus musculus; identical to SEQ ID NO: 1306

SEQ ID NO: 1309 - DNA, 69 bp, Mus musculus
tctgttcttttcattttccagagatccatttccaagagacactgtaacactttctgccctccctgtttc

SEQ ID NO: 1310 - DNA, 69 bp, Mus musculus; identical to SEQ ID NO: 1309

SEQ ID NO: 1311 - DNA, 69 bp, Mus musculus; identical to SEQ ID NO: 1309

SEQ ID NO: 1312 - DNA, 153 bp, Mus musculus
  misc_feature (61)..(61): n is a, c, g, or t
tcccttttataactaaggagcctgttacgagacctattcttttgtacaaaaatctgaatgntgcaatgaacagaatcttctacatttttatatcagttcttaatgtcagtggcgattcagttcctggggctacaggtggctcaggatttttgt

SEQ ID NO: 1313 - DNA, 153 bp, Mus musculus; identical to SEQ ID NO: 1312
  misc_feature (61)..(61): n is a, c, g, or t

SEQ ID NO: 1314 - DNA, 153 bp, Mus musculus; identical to SEQ ID NO: 1312
  misc_feature (61)..(61): n is a, c, g, or t

SEQ ID NO: 1315 - DNA, 173 bp, Mus musculus
gcagctagtcttccactgtacccattcatggaggtaggttttattacaggactcgcaccagctatttacagacgcgccctctcttatttgcctagagaaacagtcactgcattcccgcacattccttcagacccccttaccctttccctgtaggaaattttcctgtgacccct

SEQ ID NO: 1316 - DNA, 173 bp, Mus musculus; identical to SEQ ID NO: 1315

SEQ ID NO: 1317 - DNA, 173 bp, Mus musculus; identical to SEQ ID NO: 1315

SEQ ID NO: 1318 - DNA, 175 bp, Mus musculus
tgattcatagtcagaaactacatgacaacacactgattttaggtttgatttaacagttgactttggctgttcagtgcttttggaccacggttaatatgatgagctgaccctcccgataccccctgtgttcattggtcttgggtgcagtgggctgctaagggcatgacccctggat

SEQ ID NO: 1319 - DNA, 175 bp, Mus musculus; identical to SEQ ID NO: 1318

SEQ ID NO: 1320 - DNA, 175 bp, Mus musculus; identical to SEQ ID NO: 1318

SEQ ID NO: 1321 - DNA, 125 bp, Mus musculus
gttggaagcagcagccttatccacatcaaaattacgccccaccccacccctgtcctgctgatgctttttttcccttgggatccaggttcttttgcctgccctcctttggaaaagacagtgtggtt

SEQ ID NO: 1322 - DNA, 125 bp, Mus musculus; identical to SEQ ID NO: 1321

SEQ ID NO: 1323 - DNA, 125 bp, Mus musculus; identical to SEQ ID NO: 1321

SEQ ID NO: 1324 - DNA, 42 bp, Mus musculus
tctttcaacctgcctagctatattcagcgcccccatagacat

SEQ ID NO: 1325 - DNA, 42 bp, Mus musculus; identical to SEQ ID NO: 1324

SEQ ID NO: 1326 - DNA, 42 bp, Mus musculus; identical to SEQ ID NO: 1324

SEQ ID NO: 1327 - DNA, 55 bp, Mus musculus
gatatacttaggtaccaactgatacctgctccttcagagtaagcattcggcaaag

SEQ ID NO: 1328 - DNA, 55 bp, Mus musculus; identical to SEQ ID NO: 1327

SEQ ID NO: 1329 - DNA, 55 bp, Mus musculus; identical to SEQ ID NO: 1327

SEQ ID NO: 1330 - DNA, 39 bp, Mus musculus
ttacgaaattatcttcaccgcacttattcccctttccca

SEQ ID NO: 1331 - DNA, 39 bp, Mus musculus; identical to SEQ ID NO: 1330

SEQ ID NO: 1332 - DNA, 39 bp, Mus musculus; identical to SEQ ID NO: 1330

SEQ ID NO: 1333 - DNA, 180 bp, Mus musculus
ttggtcttttcgacactggcctttaaccggactggggaaggagtacccacagcaagtgaccacgcctgtcgccaaacccaggcccactgtaagagatacttgaggataaggtggccatgcattgctgggttcctggtaagaacttgtggtgcaatgggagactagactcttcctgcaggg

SEQ ID NO: 1334 - DNA, 180 bp, Mus musculus; identical to SEQ ID NO: 1333

SEQ ID NO: 1335 - DNA, 180 bp, Mus musculus; identical to SEQ ID NO: 1333

SEQ ID NO: 1336 - DNA, 41 bp, Mus musculus
acatctggatacaagaccttatgtaacaaacagaggtgtta

SEQ ID NO: 1337 - DNA, 41 bp, Mus musculus; identical to SEQ ID NO: 1336

SEQ ID NO: 1338 - DNA, 41 bp, Mus musculus; identical to SEQ ID NO: 1336

SEQ ID NO: 1339 - DNA, 183 bp, Mus musculus
ggctcttgatgatgctctttttcaattattttttttttcagtaaagtttccataacaactgaagtactttttactaaaatcaagaacaccatggatttttcccatttttcagttgtttagatttagaggttcacagttccctgctgcaactccaaaaacagagtgacctttagttcatttttt

SEQ ID NO: 1340 - DNA, 183 bp, Mus musculus; identical to SEQ ID NO: 1339

SEQ ID NO: 1341 - DNA, 183 bp, Mus musculus; identical to SEQ ID NO: 1339

SEQ ID NO: 1342 - DNA, 63 bp, Mus musculus
tgcctccccgtttcatttgatgggggttataccacccacgggacctctgggaggaagctccca

SEQ ID NO: 1343 - DNA, 63 bp, Mus musculus; identical to SEQ ID NO: 1342

SEQ ID NO: 1344 - DNA, 63 bp, Mus musculus; identical to SEQ ID NO: 1342

SEQ ID NO: 1345 - DNA, 32 bp, Mus musculus
cttgcactggaggcccaaccgtcccacctgga

SEQ ID NO: 1346 - DNA, 32 bp, Mus musculus; identical to SEQ ID NO: 1345

SEQ ID NO: 1347 - DNA, 32 bp, Mus musculus; identical to SEQ ID NO: 1345

SEQ ID NO: 1348 - DNA, 166 bp, Mus musculus
ctaacataagtactaaggagaccagctaccttcctggcttttggctttttggtgtccttgaaggagaccagtcatgactaccaaggaatttataagcttggttctagaacttagcagaggttgagttttgctgtacattggcagaccaggtcaggatgtctgcagt

SEQ ID NO: 1349 - DNA, 166 bp, Mus musculus; identical to SEQ ID NO: 1348

SEQ ID NO: 1350 - DNA, 166 bp, Mus musculus; identical to SEQ ID NO: 1348

SEQ ID NO: 1351 - DNA, 58 bp, Mus musculus
ttagggtcaatatccgtaaggttgttttgaccttcctgtggttggggtcttaatcttt

SEQ ID NO: 1352 - DNA, 58 bp, Mus musculus; identical to SEQ ID NO: 1351

SEQ ID NO: 1353 - DNA, 58 bp, Mus musculus; identical to SEQ ID NO: 1351

SEQ ID NO: 1354 - DNA, 188 bp, Mus musculus
ccattttagttatgggtcttagctgatccctaatgagaccagaggaatctgaaagctggaagtgaggcctatttctcagggtccaggtgcctggagagacgggaaaagcagtagacattttttttttagacaggtgcattcccacagtgataacccagttaacccactttgtactgtaccctttagag

SEQ ID NO: 1355 - DNA, 188 bp, Mus musculus; identical to SEQ ID NO: 1354

SEQ ID NO: 1356 - DNA, 188 bp, Mus musculus; identical to SEQ ID NO: 1354

SEQ ID NO: 1357 - DNA, 61 bp, Mus musculus
cgattctccgaagcttagagcaacttgaacgacattttttattagtacctgcagtaccagg

SEQ ID NO: 1358 - DNA, 61 bp, Mus musculus; identical to SEQ ID NO: 1357

SEQ ID NO: 1359 - DNA, 61 bp, Mus musculus; identical to SEQ ID NO: 1357

SEQ ID NO: 1360 - DNA, 65 bp, Mus musculus
ttgaatctctgcctccatggagattcagaagttatattctttcacgatttttgcttgtctatcta

SEQ ID NO: 1361 - DNA, 65 bp, Mus musculus; identical to SEQ ID NO: 1360

SEQ ID NO: 1362 - DNA, 65 bp, Mus musculus; identical to SEQ ID NO: 1360

SEQ ID NO: 1363 - DNA, 93 bp, Mus musculus
gtccccagctgaccatcggagtgtcctggatgagtagccagcatatttgtgcttacaaagcaaaagtgtggacttgcagcaatatactacttt

SEQ ID NO: 1364 - DNA, 93 bp, Mus musculus; identical to SEQ ID NO: 1363

SEQ ID NO: 1365 - DNA, 93 bp, Mus musculus; identical to SEQ ID NO: 1363

SEQ ID NO: 1366 - DNA, 197 bp, Mus musculus
  misc_feature (26)..(40): n is a, c, g, or t
gaagtgtgagccacctgcagttgttnnnnnnnnnnnnnnnaccgtaatccccgccacccattgctgcatccttccggattctggccctcaggctgttttggattccaggattggagttgcgtcagagctccgtgggctgcctgatgtcctctaaccagaatgcttttggctggggttccttgggacaaaatgcctct

SEQ ID NO: 1367 - DNA, 197 bp, Mus musculus; identical to SEQ ID NO: 1366
  misc_feature (26)..(40): n is a, c, g, or t

SEQ ID NO: 1368 - DNA, 197 bp, Mus musculus; identical to SEQ ID NO: 1366
  misc_feature (26)..(40): n is a, c, g, or t

SEQ ID NO: 1369 - DNA, 73 bp, Mus musculus
atgtatctcaacacccaagaggcgagccctaatgaggaggctccctctttcaatccagagaatgctggaccaa

SEQ ID NO: 1370 - DNA, 73 bp, Mus musculus; identical to SEQ ID NO: 1369

SEQ ID NO: 1371 - DNA, 73 bp, Mus musculus; identical to SEQ ID NO: 1369

SEQ ID NO: 1372 - DNA, 160 bp, Mus musculus
acgcactcagctgacttttttcgcccccccgcccgaaaaaaaaaaagaaaaaaaaacccccgccatatcatgtagtctggatttttaagcgacattaacacgggaatagtttgtgtagagaaacctcaagtttccccagctgtgccatgtgtgtatttgc

SEQ ID NO: 1373 - DNA, 160 bp, Mus musculus; identical to SEQ ID NO: 1372

SEQ ID NO: 1374 - DNA, 160 bp, Mus musculus; identical to SEQ ID NO: 1372

SEQ ID NO: 1375 - DNA, 113 bp, Mus musculus
atgtgaataacttttcagagcagctggtacccctgatcggcttgggtctgcttcccgttgttacaatgggccctatgcagcctccccctgttttgcaggctcctttataaggg

SEQ ID NO: 1376 - DNA, 113 bp, Mus musculus; identical to SEQ ID NO: 1375

SEQ ID NO: 1377 - DNA, 113 bp, Mus musculus; identical to SEQ ID NO: 1375

SEQ ID NO: 1378 - DNA, 63 bp, Mus musculus
tccccttggacccctgactcttctaatctaatccccgcttttaatagaccagatatatggtaa

SEQ ID NO: 1379 - DNA, 63 bp, Mus musculus; identical to SEQ ID NO: 1378

SEQ ID NO: 1380 - DNA, 63 bp, Mus musculus; identical to SEQ ID NO: 1378

SEQ ID NO: 1381 - DNA, 67 bp, Mus musculus
tatcttctaatgctcatctggttagaagatattcttgcctctcaccgtgtttactataaagtacagt

SEQ ID NO: 1382 - DNA, 67 bp, Mus musculus; identical to SEQ ID NO: 1381

SEQ ID NO: 1383 - DNA, 67 bp, Mus musculus; identical to SEQ ID NO: 1381

SEQ ID NO: 1384 - DNA, 196 bp, Mus musculus
  misc_feature (127)..(141): n is a, c, g, or t
gagcttacaaaaccatcaggacccttacattcttccaaaccttcgagtccatgggcccctgagcaatattcaagattttgccaaaaattttcatagtccaagtgggacccttctgaatccctttgcnnnnnnnnnnnnnnngtaaaaattggctaccaaagagactgatgtaaatgcatgggctgcttgtgagtcc

SEQ ID NO: 1385 - DNA, 196 bp, Mus musculus; identical to SEQ ID NO: 1384
  misc_feature (127)..(141): n is a, c, g, or t

SEQ ID NO: 1386 - DNA, 196 bp, Mus musculus; identical to SEQ ID NO: 1384
  misc_feature (127)..(141): n is a, c, g, or t

SEQ ID NO: 1387 - DNA, 100 bp, Mus musculus
caggtcaacgctcttctcgctaacattccagtatcctatgaagacaccacagtctgacgtgcatcaggaaggtgcagcaggcctctgcagattttcctcc

SEQ ID NO: 1388 - DNA, 100 bp, Mus musculus; identical to SEQ ID NO: 1387

SEQ ID NO: 1389 - DNA, 100 bp, Mus musculus; identical to SEQ ID NO: 1387

SEQ ID NO: 1390 - DNA, 136 bp, Mus musculus
actcgtcagattttaaaggtcagcctttttttgaagttgcctgatccaatagttcaagagaattaaataaaacgatctgctttctaaaacctagaatcaaaaagctactgttggttccaaaacatgacctttttag

SEQ ID NO: 1391 - DNA, 136 bp, Mus musculus; identical to SEQ ID NO: 1390

SEQ ID NO: 1392 - DNA, 136 bp, Mus musculus; identical to SEQ ID NO: 1390

SEQ ID NO: 1393 - DNA, 161 bp, Mus musculus
ttggaccaactgagccacctacatgatatggtctttgtcctgtagatatacctacaggtatgcagttttctcccagtgtctagtattcatgatctgtatcatattttggtttctaatttttgcattgctaactgtttttgtgtcccttgtgctgttgtcaa

SEQ ID NO: 1394 - DNA, 161 bp, Mus musculus; identical to SEQ ID NO: 1393

SEQ ID NO: 1395 - DNA, 161 bp, Mus musculus; identical to SEQ ID NO: 1393

SEQ ID NO: 1396 - DNA, 84 bp, Mus musculus
tgtgtttctgctttatcaaccagcacccatattacttcgtatccttcttgcactgctccactgatccagtgttataagccagct

SEQ ID NO: 1397 - DNA, 84 bp, Mus musculus; identical to SEQ ID NO: 1396

SEQ ID NO: 1398 - DNA, 84 bp, Mus musculus; identical to SEQ ID NO: 1396

SEQ ID NO: 1399 - DNA, 149 bp, Mus musculus
tgtgtacctttaccctggctcgatggatggatggagagggagcgggctcattcttccctgggtgggttatgtgacagttacttggactcaacctgttctgttcccaggcggccatgcagacattcttcagctatttcctttctttgtca

SEQ ID NO: 1400 - DNA, 149 bp, Mus musculus; identical to SEQ ID NO: 1399

SEQ ID NO: 1401 - DNA, 149 bp, Mus musculus; identical to SEQ ID NO: 1399

SEQ ID NO: 1402 - DNA, 91 bp, Mus musculus
acgttctttgtggtgacacagatcgtgttggtgcccctttccctcttcggtgtatgtaaaagtacaggaagtcatcctggtgtacctatgg

SEQ ID NO: 1403 - DNA, 91 bp, Mus musculus; identical to SEQ ID NO: 1402

SEQ ID NO: 1404 - DNA, 91 bp, Mus musculus; identical to SEQ ID NO: 1402

SEQ ID NO: 1405 - DNA, 113 bp, Mus musculus
ttctttatttggacattctgagggcccaattccaacaccactcaggagcgagattattttagattataggataaattcgtttcttgtgcccactctgttctttgctgttgaca

SEQ ID NO: 1406 - DNA, 113 bp, Mus musculus; identical to SEQ ID NO: 1405

SEQ ID NO: 1407 - DNA, 113 bp, Mus musculus; identical to SEQ ID NO: 1405

SEQ ID NO: 1408 - DNA, 141 bp, Mus musculus
tgctacatcagcacctacccctcccttcacctccatccctgttctttcttcaccaaccagggcaaatttccccatttttacatctaaatacaccaaagagatgagaatttcacaattgcaccaacaaacttctttgactct

SEQ ID NO: 1409 - DNA, 141 bp, Mus musculus; identical to SEQ ID NO: 1408

SEQ ID NO: 1410 - DNA, 141 bp, Mus musculus; identical to SEQ ID NO: 1408

SEQ ID NO: 1411 - DNA, 123 bp, Mus musculus
tcatttcgccgctagggattctgaaggtacacccattctccggtgtaggcagagttctgcctcaagaagggatcccaggccctcctttctgacctctggctcttcgttgtactttggaatcct

SEQ ID NO: 1412 - DNA, 123 bp, Mus musculus; identical to SEQ ID NO: 1411

SEQ ID NO: 1413 - DNA, 123 bp, Mus musculus; identical to SEQ ID NO: 1411

SEQ ID NO: 1414 - DNA, 143 bp, Mus musculus
tgcattcctgggttacacgtgctttagcagaggcagcatcaaggtcaaaggcaaaggggaattctgtacctacttcctgaacacggacctgacgcggaccggatttccctcagcttcctaggcacctgagctccccttttcga

SEQ ID NO: 1415 - DNA, 143 bp, Mus musculus; identical to SEQ ID NO: 1414

SEQ ID NO: 1416 - DNA, 143 bp, Mus musculus; identical to SEQ ID NO: 1414

SEQ ID NO: 1417 - DNA, 198 bp, Mus musculus
tcccctgtttgaaggctcttctgaaggtacctttggatttattttcaccttactgctttttccctggggaataaaaatacccagcttagcaccctggctaggctgggaagtaactctaggctagggaagtaggccagttcagcccttcctcattgaccttttggcagaaaggccgattttttacctattggagaacat

SEQ ID NO: 1418 - DNA, 198 bp, Mus musculus; identical to SEQ ID NO: 1417

SEQ ID NO: 1419 - DNA, 198 bp, Mus musculus; identical to SEQ ID NO: 1417

SEQ ID NO: 1420 - DNA, 206 bp, Mus musculus
gactcccatttttacatttgggctttttgctgcccctagtggagctggggccagtacccacagcagctttggtgcctctggtttttccaacaagtgagatacagattgttaataatcacagctttttcttctcaagccagggtgcattttcagaaacgtattcaatgcagcattccaggcagccactatcaaatcaactgaagttg

SEQ ID NO: 1421 - DNA, 206 bp, Mus musculus; identical to SEQ ID NO: 1420

SEQ ID NO: 1422 - DNA, 206 bp, Mus musculus; identical to SEQ ID NO: 1420

SEQ ID NO: 1423 - DNA, 164 bp, Mus musculus
cactgaaaactgctgaagcccacacccttcacccccgaaggctcagcggccactaccagcgcccttgctgtggttgtgtttctgcttccctggcacacttgggcaggcagctcagtcactctgaacttgcttattttctttcttgtgagtgtgctgcttgagac

SEQ ID NO: 1424 - DNA, 164 bp, Mus musculus; identical to SEQ ID NO: 1423

SEQ ID NO: 1425 - DNA, 164 bp, Mus musculus; identical to SEQ ID NO: 1423

SEQ ID NO: 1426 - DNA, 74 bp, Mus musculus
tatagtgaccatttggagcagtttcctctcgtattcttatgtacatattctgccatcagagagttgtaaataag

SEQ ID NO: 1427 - DNA, 182 bp, Mus musculus
ccaggagcctgagttatttgaggcccctgaggacatggctcccctagagaacgattatgaggaggttggggcagattttgctgaaggagacgatgagggtgaggaatattaactcatgtgctgccattttatacttttgtgttttcttctttttctttgtgtgtgttctaactttcctaaac

SEQ ID NO: 1428 - DNA, 182 bp, Mus musculus; identical to SEQ ID NO: 1427

SEQ ID NO: 1429 - DNA, 182 bp, Mus musculus; identical to SEQ ID NO: 1427

SEQ ID NO: 1430 - DNA, 95 bp, Mus musculus
ctcaactagactaatcttccttcttgcaaacacttatcatccacctcctactcccctccccttacatctgccccacagctaccctggtccttgta

SEQ ID NO: 1431 - DNA, 95 bp, Mus musculus; identical to SEQ ID NO: 1430

SEQ ID NO: 1432 - DNA, 95 bp, Mus musculus; identical to SEQ ID NO: 1430

SEQ ID NO: 1433 - DNA, 136 bp, Mus musculus
  misc_feature (87)..(106): n is a, c, g, or t
ctcctgggcacctacacaacatgccaaccccaaccgattagtcccccataccaactagacccgataccacctattagacccagacgnnnnnnnnnnnnnnnnnnnncttatccacacggcttcatttttacacctt

SEQ ID NO: 1434 - DNA, 136 bp, Mus musculus; identical to SEQ ID NO: 1433
  misc_feature (87)..(106): n is a, c, g, or t

SEQ ID NO: 1435 - DNA, 136 bp, Mus musculus; identical to SEQ ID NO: 1433
  misc_feature (87)..(106): n is a, c, g, or t

SEQ ID NO: 1436 - DNA, 239 bp, Mus musculus
  misc_feature (112)..(138): n is a, c, g, or t
gcaccttatgacacgcagatgcctcccattactagtctaataagaaatactcacgcgagtcaccctttctttttaactagcattttgggcttcatatttgtccaatgggatnnnnnnnnnnnnnnnnnnnnnnnnnnnggttagagactaactggaaagttggcttgaaaatgcaggcttgtgttcccaggtacacaggaggctgaggcatgagattcccaaattcaaggcttcagggg

SEQ ID NO: 1437 - DNA, 239 bp, Mus musculus; identical to SEQ ID NO: 1436
  misc_feature (112)..(138): n is a, c, g, or t

SEQ ID NO: 1438 - DNA, 239 bp, Mus musculus; identical to SEQ ID NO: 1436
  misc_feature (112)..(138): n is a, c, g, or t

SEQ ID NO: 1439 - DNA, 155 bp, Mus musculus
cgtcggtttgggatcggaaactatgatctagtacagcaaaaggtaggaccaggtaaaacatgccattttataaaaaaaatgtgtacttggtcttttttctgtttctgttttattccactagagtaaatgtttccttgatgtaaatgcaaagcatt

SEQ ID NO: 1440 - DNA, 155 bp, Mus musculus; identical to SEQ ID NO: 1439

SEQ ID NO: 1441 - DNA, 155 bp, Mus musculus; identical to SEQ ID NO: 1439

SEQ ID NO: 1442 - DNA, 58 bp, Mus musculus
ctaaaacgctaagtccactttgttgattcgattcaatggtccttaagactgtttaaga

SEQ ID NO: 1443 - DNA, 58 bp, Mus musculus; identical to SEQ ID NO: 1442

SEQ ID NO: 1444 - DNA, 58 bp, Mus musculus; identical to SEQ ID NO: 1442

SEQ ID NO: 1445 - DNA, 207 bp, Mus musculus
gtcaggagtagtttccagaggtggctccccttttcattacaacccaccctccacccctgtttcccagaggagagtagcagtgcttcaccacacaggttgggggacaatgcctgggaaggctgtggccagtggaagcagccgacgggcagaggtttccaaactacttgaaggtcttttaaaaattttccatgtatacaaaaatcccga

SEQ ID NO: 1446 - DNA, 207 bp, Mus musculus; identical to SEQ ID NO: 1445

SEQ ID NO: 1447 - DNA, 207 bp, Mus musculus; identical to SEQ ID NO: 1445

SEQ ID NO: 1448 - DNA, 42 bp, Mus musculus
gatgagataggccctccacactaatgctctctcagcttattg

SEQ ID NO: 1449 - DNA, 42 bp, Mus musculus; identical to SEQ ID NO: 1448

SEQ ID NO: 1450 - DNA, 42 bp, Mus musculus; identical to SEQ ID NO: 1448

SEQ ID NO: 1451 - DNA, 107 bp, Mus musculus
tgtgacatctctccagacgtcctgtcaaattcagttggactcctcttaagaatattttcattcaaccaaatattttcaaatttgaattcagatcacttgttcctgtt

SEQ ID NO: 1452 - DNA, 107 bp, Mus musculus; identical to SEQ ID NO: 1451

SEQ ID NO: 1453 - DNA, 107 bp, Mus musculus; identical to SEQ ID NO: 1451

SEQ ID NO: 1454 - DNA, 76 bp, Mus musculus
accattagtggaatgttctgtcgctttgccaaacccctttgacaagttccagtttgagccccctggatacttttct

SEQ ID NO: 1455 - DNA, 76 bp, Mus musculus; identical to SEQ ID NO: 1454

SEQ ID NO: 1456 - DNA, 76 bp, Mus musculus; identical to SEQ ID NO: 1454

SEQ ID NO: 1457 - DNA, 188 bp, Mus musculus
tctgtacttgggaatcccaactctgaatttttacaaaatccatcgtaacaaaagagtgttataaatttaatccacagggcatagttttttttataccttctgttaattttttttccttaataattttttatctgtttttagaataaatcataatccctactgcaccaccttgaaaatgttgtttccag

SEQ ID NO: 1458 - DNA, 188 bp, Mus musculus; identical to SEQ ID NO: 1457

SEQ ID NO: 1459 - DNA, 188 bp, Mus musculus; identical to SEQ ID NO: 1457

SEQ ID NO: 1460 - DNA, 207 bp, Mus musculus
ttcgtttacctctgccccttggagtttaggtgcaccaacttctacattcctgttccaagcacgcgaccagagaggccagaacctgcttatggaaagcagggcacacccacaggcagtggctcagggttccttgggtgcatgtgtatagttgaagctgcctttttgcatgtatcctttggctgtaatgctttctgttggttttgcagc

SEQ ID NO: 1461 - DNA, 207 bp, Mus musculus; identical to SEQ ID NO: 1460

SEQ ID NO: 1462 - DNA, 207 bp, Mus musculus; identical to SEQ ID NO: 1460

SEQ ID NO: 1463 - DNA, 131 bp, Mus musculus
gcaggcccagcatggctgcgtccattcattccattcttgttgaaccagcttcctaaccattaacattgcaatttgctttgagaccttcccttttctgggtactaggtgctatgaacccagctgacagaagc

SEQ ID NO: 1464 - DNA, 131 bp, Mus musculus; identical to SEQ ID NO: 1463

SEQ ID NO: 1465 - DNA, 131 bp, Mus musculus; identical to SEQ ID NO: 1463

SEQ ID NO: 1466 - DNA, 167 bp, Mus musculus
  misc_feature (58)..(58): n is a, c, g, or t
agctattgttacacagttttccttgggtggcctgtagactagaagaggaggtattggncaggatttaagcacagctaaaattaactagatgtttcttgtatatagcagaagaaggacccccaagacctgaccattaacccccagtgtcagggcctacctgcttcttt

SEQ ID NO: 1467 - DNA, 167 bp, Mus musculus; identical to SEQ ID NO: 1466
  misc_feature (58)..(58): n is a, c, g, or t

SEQ ID NO: 1468 - DNA, 167 bp, Mus musculus; identical to SEQ ID NO: 1466
  misc_feature (58)..(58): n is a, c, g, or t

SEQ ID NO: 1469 - DNA, 169 bp, Mus musculus
  misc_feature (43)..(73): n is a, c, g, or t
tctcaacagtagactgtccctgaccccagatggaaaataggannnnnnnnnnnnnnnnnnnnnnnnnnnnnnncagccaaggcccctgggctccttgttttgacaaactaagatcaaatcccagagaggccacgtgattgctgtgtggcactgggcaggtgacttctct

SEQ ID NO: 1470 - DNA, 169 bp, Mus musculus; identical to SEQ ID NO: 1469
  misc_feature (43)..(73): n is a, c, g, or t

SEQ ID NO: 1471 - DNA, 169 bp, Mus musculus; identical to SEQ ID NO: 1469
  misc_feature (43)..(73): n is a, c, g, or t

SEQ ID NO: 1472 - DNA, 173 bp, Mus musculus
  misc_feature (26)..(43): n is a, c, g, or t
taatcctgtgtgtgtgccaaacctannnnnnnnnnnnnnnnnntttcccaagggcctttttttagttttgggaggatcacacctttccctacacaccctgttacacactcacacagttacttcccaggcagccagatgaatttcaggccatggcagttccacacaccctagtg

SEQ ID NO: 1473 - DNA, 173 bp, Mus musculus; identical to SEQ ID NO: 1472
  misc_feature (26)..(43): n is a, c, g, or t

SEQ ID NO: 1474 - DNA, 173 bp, Mus musculus; identical to SEQ ID NO: 1472
  misc_feature (26)..(43): n is a, c, g, or t

SEQ ID NO: 1475 - DNA, 195 bp, Mus musculus
acgtgagccatcctacacccttggtcaaatcttatctccaaacttcaagaattatcttcccagacaactctttaagacaccaattcaagctgtttttgggccaaatttattccaagagaaacaataaaaccctacagaaaaaatgttttggcaaaattttttggtgttgatattacccggaaaatgaaacttctg

SEQ ID NO: 1476 - DNA, 195 bp, Mus musculus; identical to SEQ ID NO: 1475

SEQ ID NO: 1477 - DNA, 195 bp, Mus musculus; identical to SEQ ID NO: 1475

SEQ ID NO: 1478 - DNA, 261 bp, Mus musculus
  misc_feature (107)..(107): n is a, c, g, or t
  misc_feature (119)..(119): n is a, c, g, or t
cccaccaggacatccgaaagcggaactacgtgcgggatgatgcggttttcatccgtgcctctgtcgaactgccccggaagatcctcagctgagtagagccttttggnttcaagtgggangggaggcgggactggatctgaaactggattgggggccggacctcctttcagcttcttttgcctaggctgttagcccactctccctaccaccaccaccaccaccaccaccatccctacccctcaggtgcctccaattggtgct

SEQ ID NO: 1479 - DNA, 261 bp, Mus musculus; identical to SEQ ID NO: 1478
  misc_feature (107)..(107): n is a, c, g, or t
  misc_feature (119)..(119): n is a, c, g, or t

SEQ ID NO: 1480 - DNA, 530 bp, Mus musculus
  misc_feature (35)..(35): n is a, c, g, or t
  misc_feature (62)..(62): n is a, c, g, or t
  misc_feature (73)..(94): n is a, c, g, or t
  misc_feature (214)..(214): n is a, c, g, or t
  misc_feature (295)..(295): n is a, c, g, or t
  misc_feature (297)..(297): n is a, c, g, or t
  misc_feature (310)..(310): n is a, c, g, or t
  misc_feature (315)..(315): n is a, c, g, or t
  misc_feature (396)..(396): n is a, c, g, or t
  misc_feature (402)..(402): n is a, c, g, or t
  misc_feature (438)..(438): n is a, c, g, or t
  misc_feature (456)..(458): n is a, c, g, or t
  misc_feature (460)..(460): n is a, c, g, or t
  misc_feature (462)..(463): n is a, c, g, or t
  misc_feature (465)..(476): n is a, c, g, or t
tcacagaatccatcaaccggaatagagaagagccnttctcctcagaggaaatccaggcttgnctgagccggannnnnnnnnnnnnnnnnnnnnnggtgtctgagggcatcgtcttccttatctgaagttgttgctaccaagtactgccctgtccccagcctttgtctcccatcctccagtaacttttttaagggatggaagctgatggtgagangatcaggacttggtggaagctttgtgtatgacttctgccttggggcaagagctggagggagggccaggactcaggcagaangnctgcctcacaagncccantcctaaacatggggagtcttcatgatttgagctgtgtttctgggcacagctgtgtcctgcgtttgttacttgtgtttttanccccanccccaggcactttagtccaggaagctttgaggtctnttgggccaagagtggctnnngncnnannnnnnnnnnnnattgatactgagtaaatataactattttgtacatgtggacttcatgctttgtgc

SEQ ID NO: 1481 - DNA, 530 bp, Mus musculus; identical to SEQ ID NO: 1480
  misc_feature (35)..(35): n is a, c, g, or t
  misc_feature (62)..(62): n is a, c, g, or t
  misc_feature (73)..(94): n is a, c, g, or t
  misc_feature (214)..(214): n is a, c, g, or t
  misc_feature (295)..(295): n is a, c, g, or t
  misc_feature (297)..(297): n is a, c, g, or t
  misc_feature (310)..(310): n is a, c, g, or t
  misc_feature (315)..(315): n is a, c, g, or t
  misc_feature (396)..(396): n is a, c, g, or t
  misc_feature (402)..(402): n is a, c, g, or t
  misc_feature (438)..(438): n is a, c, g, or t
  misc_feature (456)..(458): n is a, c, g, or t
  misc_feature (460)..(460): n is a, c, g, or t
  misc_feature (462)..(463): n is a, c, g, or t
  misc_feature (465)..(476): n is a, c, g, or t

SEQ ID NO: 1482 - DNA, 393 bp, Mus musculus
  misc_feature (101)..(101): n is a, c, g, or t
  misc_feature (107)..(110): n is a, c, g, or t
  misc_feature (123)..(123): n is a, c, g, or t
  misc_feature (182)..(182): n is a, c, g, or t
  misc_feature (186)..(186): n is a, c, g, or t
  misc_feature (188)..(188): n is a, c, g, or t
  misc_feature (190)..(207): n is a, c, g, or t
  misc_feature (211)..(211): n is a, c, g, or t
  misc_feature (219)..(219): n is a, c, g, or t
  misc_feature (227)..(253): n is a, c, g, or t
  misc_feature (255)..(255): n is a, c, g, or t
cagattggaataccttgggatctcctcaccccactttacagaactgcccaatccaggggctctgggatatggctgcccgggattacagaaagacacggcantgccgnnnnacacccatgctgnttagaagcctaagcctctgccttcaagctggatcctgtgcagggtgggcaggcaagaantcananannnnnnnnnnnnnnnnnngcgncctgcatntggccccnnnnnnnnnnnnnnnnnnnnnnnnnnnanttcggttggggaaacagaagctgagggagcttagatggggtgggggatccaagcccctcccagcccacccattggccaggcagcaggggggagtggccaggcggctggttgtgggccaagtcctgcatattcactaat

SEQ ID NO: 1483 - DNA, 393 bp, Mus musculus; identical to SEQ ID NO: 1482
  misc_feature (101)..(101): n is a, c, g, or t
  misc_feature (107)..(110): n is a, c, g, or t
  misc_feature (123)..(123): n is a, c, g, or t
  misc_feature (182)..(182): n is a, c, g, or t
  misc_feature (186)..(186): n is a, c, g, or t
  misc_feature (188)..(188): n is a, c, g, or t
  misc_feature (190)..(207): n is a, c, g, or t
  misc_feature (211)..(211): n is a, c, g, or t
  misc_feature (219)..(219): n is a, c, g, or t
  misc_feature (227)..(253): n is a, c, g, or t
  misc_feature (255)..(255): n is a, c, g, or t

SEQ ID NO: 1484 - DNA, 463 bp, Mus musculus
  misc_feature (47)..(47): n is a, c, g, or t
  misc_feature (97)..(97): n is a, c, g, or t
  misc_feature (110)..(110): n is a, c, g, or t
  misc_feature (112)..(112): n is a, c, g, or t
  misc_feature (114)..(114): n is a, c, g, or t
  misc_feature (136)..(136): n is a, c, g, or t
  misc_feature (138)..(138): n is a, c, g, or t
  misc_feature (145)..(145): n is a, c, g, or t
  misc_feature (155)..(155): n is a, c, g, or t
  misc_feature (204)..(213): n is a, c, g, or t
  misc_feature (226)..(257): n is a, c, g, or t
  misc_feature (357)..(357): n is a, c, g, or t
  misc_feature (361)..(361): n is a, c, g, or t
  misc_feature (364)..(364): n is a, c, g, or t
  misc_feature (367)..(367): n is a, c, g, or t
  misc_feature (369)..(369): n is a, c, g, or t
  misc_feature (371)..(372): n is a, c, g, or t
  misc_feature (374)..(374): n is a, c, g, or t
  misc_feature (376)..(376): n is a, c, g, or t
  misc_feature (381)..(381): n is a, c, g, or t
  misc_feature (400)..(400): n is a, c, g, or t
  misc_feature (432)..(432): n is a, c, g, or t
agaggctgttgagactgagatcctgtgggacagtcagttggtccgtntccaaatccccgcttaccactgatgttttagctgatggtgactggcatantcccaattccctntntntccaagtaggtggtgttagaantnttaattnttttcccttnttttgtatggactacaaataaaacttggggcgattcgtggtttggaaannnnnnnnnnattgtcttgattnnnnnnnnnnnnnnnnnnnnnnnnnnnnnnnnaagacgtgacagctagaagaaaggcagcctgaagacccagagtgggtgtggaagggtgcttgagtgtggggattggaatggtttcctggcgaccaatggnattnagntcntntnnantngcatnccatctttgggactagagngttcagatcaagtggttggactttctcagcantcaattttagttgatcacgtcaaatttcagt

SEQ ID NO: 1485 - DNA, 463 bp, Mus musculus; identical to SEQ ID NO: 1484
  misc_feature (47)..(47): n is a, c, g, or t
  misc_feature (97)..(97): n is a, c, g, or t
  misc_feature (110)..(110): n is a, c, g, or t
  misc_feature (112)..(112): n is a, c, g, or t
  misc_feature (114)..(114): n is a, c, g, or t
  misc_feature (136)..(136): n is a, c, g, or t
  misc_feature (138)..(138): n is a, c, g, or t
  misc_feature (145)..(145): n is a, c, g, or t
  misc_feature (155)..(155): n is a, c, g, or t
  misc_feature (204)..(213): n is a, c, g, or t
  misc_feature (226)..(257): n is a, c, g, or t
  misc_feature (357)..(357): n is a, c, g, or t
  misc_feature (361)..(361): n is a, c, g, or t
  misc_feature (364)..(364): n is a, c, g, or t
  misc_feature (367)..(367): n is a, c, g, or t
  misc_feature (369)..(369): n is a, c, g, or t
  misc_feature (371)..(372): n is a, c, g, or t
  misc_feature (374)..(374): n is a, c, g, or t
  misc_feature (376)..(376): n is a, c, g, or t
  misc_feature (381)..(381): n is a, c, g, or t
  misc_feature (400)..(400): n is a, c, g, or t
  misc_feature (432)..(432): n is a, c, g, or t

SEQ ID NO: 1486 - DNA, 319 bp, Mus musculus
gtctagtgcttctgggcaagaagaagaagaaagaggtggatggagatgggaagaagaaagatgggagtgacggagggctggaagaggaaaaggaacagtcacatagacctttcctcatgctgcaggctaggcagtccgaagaccaccctcatcgcaggcgtaggcggggcttggagtgcgacggcaaggtcaacatttgctgtaagaaacagttctttgtcagcttcaaggacattggctggaatgactggatcattgctccctctggctatcacgccaattattgtgagggggagtgcccaagccacatagcaggcac

SEQ ID NO: 1487 - DNA, 319 bp, Mus musculus; identical to SEQ ID NO: 1486

SEQ ID NO: 1488 - DNA, 564 bp, Mus musculus
  misc_feature (439)..(439): n is a, c, g, or t
gagaaaccttcatctaaaaggcgagggaaaaagcctggcctggcccctgctcgcaaacctcggggtttctcagtttccaagctgattcctgaggccctttccacatcgcaggaacgggcaggaatgtcccttgctgccctgaagaaagccctggctgcggctggttacgacgtggagaagaacaacagccgcatcaagctggccctcaagagacttgtgaataaaggagtcctggtgcagaccaagggcactggcgcctcaggctccttcaagctcagtaagaaggcggcttctgggaacgacaagggcaagggcaagaaatctgcttctgccaaggctaagaagatgggcttgccccgggcctccagatctcccaagagtagcaagaccaaggctgtcaagaagccaaaggctacgcccacaaaagcttctgggagcngaaggaagaccaaaggggccaagggcgtgcagcaacgtaaaagccccgccaaagccagggcagcaaaccccaattctgggaaggcaaagatggtcatgcagaagaccgatctgaggaaggcagca

SEQ ID NO: 1489 - DNA, 564 bp, Mus musculus; identical to SEQ ID NO: 1488
  misc_feature (439)..(439): n is a, c, g, or t

SEQ ID NO: 1490 - DNA, 362 bp, Mus musculus
  misc_feature (224)..(224): n is a, c, g, or t
  misc_feature (275)..(275): n is a, c, g, or t
atgctgataatacttgggaaccagaagaaaatttagattgtccagaattaattgaagcatttcttaattctcaaaaagctggtaaagaaaaagatggtacaaaaaggaaatctttatctgacagtgaatctgatgatagcaaatcgaagaagaagagagatgctgctgacaaaccaaggggctttgccagaggtctcgaccctgaacgaataatcggcgccacngacagcagcggagagttaatgtttctcatgaagtggaaggactcggacgangccgacttggtgctggcaaaggaggcgaacatgaagtgtcctcagattgtcattgccttctacgaggagcggctgacttggcattct

SEQ ID NO: 1491 - DNA, 362 bp, Mus musculus; identical to SEQ ID NO: 1490
  misc_feature (224)..(224): n is a, c, g, or t
  misc_feature (275)..(275): n is a, c, g, or t

SEQ ID NO: 1492 - DNA, 99 bp, Mus musculus
tgggtctcagaattcacccgagaacttggtagctgagctagtttgtccattcagaattttttcccgaaaagagaccaagttacaagtgattgggttctt

SEQ ID NO: 1493 - DNA, 99 bp, Mus musculus; identical to SEQ ID NO: 1492

SEQ ID NO: 1494 - DNA, 229 bp, Mus musculus
ggttcctgagccctgccaccccaaggctcctgagccctgccatcccaaggctcctgagccctgccaccccaaggctcctgagccctgccaccccaaggctcctgagccctgccaccccaaggctcctgagccctgccaccccaaggctcctgaaccctgccaccccaaggctcctgagccctgccaccccaaggctcctgagccctgccaccccaaggttcctgagccc

SEQ ID NO: 1495 - DNA, 229 bp, Mus musculus; identical to SEQ ID NO: 1494

SEQ ID NO: 1496 - DNA, 483 bp, Mus musculus
  misc_feature (318)..(347): n is a, c, g, or t
cagccaagcaagctgcttccgggaaccagccaggagggaacccactccagggtgcacctgcatctaagtcctgttgcatccagtagctgactgcactgcagcagggcacagccctcaggaaggaggaggtcaccctggcactggacagttaaagaaccaggagcttggaagtggtggcaaacacagcaggcatctatatcatcaaatggtcttagacattggttctgttctgttctgttctgttctgttctgttctgttctgttctgttctgttctgttctgttctgtcctgtcctgttctgttctgttttagacagnnnnnnnnnnnnnnnnnnnnnnnnnnnnnnctgggctggcctcaaactcacaggcctccacctgcctctgtgtcctgagttctgagttaataagcaagcaccatcacacagggacttagagattgtgtttaattctaaaaagtctatcgagtctagcctaatattc

SEQ ID NO: 1497 - DNA, 483 bp, Mus musculus; identical to SEQ ID NO: 1496
  misc_feature (318)..(347): n is a, c, g, or t

SEQ ID NO: 1498 - DNA, 266 bp, Mus musculus
  misc_feature (104)..(151): n is a, c, g, or t
acacagcctacatgcagctcagcagcctgacatctgaggactctgcggtctattactgtgcaagatcggggggctcctatagatacgacggaggctttgactannnnnnnnnnnnnnnnnnnnnnnnnnnnnnnnnnnnnnnnnnnnnnnntggtggtggttcgggtggtggtggttcggatatcgagctcacacagactacatcctccctgtctgcctctctgggagacagagtcaccatcagttgcagggcaagtcaggacatt

SEQ ID NO: 1499 - DNA, 266 bp, Mus musculus; identical to SEQ ID NO: 1498
  misc_feature (104)..(151): n is a, c, g, or t

SEQ ID NO: 1500 - DNA, 557 bp, Mus musculus
  misc_feature (187)..(234): n is a, c, g, or t
aattttttatccaggaaatggtgatacttcctacaatcagaagttcaaagacaaggccacattgactgctgacaaatcctccaacacagcctacatgcagctcagcagcctgacatctgaggactctgcggtctattactgtgcaagatcggggggctcctatagatacgacggaggctttgactannnnnnnnnnnnnnnnnnnnnnnnnnnnnnnnnnnnnnnnnnnnnnnntggtggtggttcgggtggtggtggttcggatatcgagctcacacagactacatcctccctgtctgcctctctgggagacagagtcaccatcagttgcagggcaagtcaggacattagtaattatttaaactggtatcaacagaatccagatggaactgttaaactcctgatctactacacatcaaatttacactcagaagtcccatcacggttcagtggcagtgggtctggaacagattattctctcaccattagcaacctggaacaagaagatattgccacttacttttgccaacaggattttacgcttccgttcacgttcg

SEQ ID NO: 1501 - DNA, 557 bp, Mus musculus; identical to SEQ ID NO: 1500
  misc_feature (187)..(234): n is a, c, g, or t

SEQ ID NO: 1502 - DNA, 462 bp, Mus musculus
  misc_feature (244)..(244): n is a, c, g, or t
  misc_feature (283)..(283): n is a, c, g, or t
  misc_feature (394)..(394): n is a, c, g, or t
  misc_feature (431)..(431): n is a, c, g, or t
agtttggggacactctgtattcctgttttcattctaacaaagaggacagagctattttgctatgataatctctgtggtttatgataataatctgaacagcaaacagtgccattaagtgcacagatgttaatgcaactaatggttgtgccagctattccctagaggtcctagacacacagactgccttagcccccacacctctgtccctaggagaatgaatgggcagagtggagctgacactctntcctcaggcagcctcctcagcctttattcgtcaacggcntctgctcagccaggcccttccagacaaaaggcactgaggaacttgcaccccttccagggagggtgtccaagtagcaccgttcctgcccagtgggaaagcaatcccaacatntctgagatgttcggacttttaaattcatgtaaatatntcctcttctgctgtgtgtacataggactaca

SEQ ID NO: 1503 - DNA, 462 bp, Mus musculus; identical to SEQ ID NO: 1502
  misc_feature (244)..(244): n is a, c, g, or t
  misc_feature (283)..(283): n is a, c, g, or t
  misc_feature (394)..(394): n is a, c, g, or t
  misc_feature (431)..(431): n is a, c, g, or t

SEQ ID NO: 1504 - DNA, 547 bp, Mus musculus
  misc_feature (506)..(521): n is a, c, g, or t
ggaagttcattcacccataaagccccgcacagtgcacgtgaggagggggagaagccgcaggaataattctaggatccaacgcgtgactcagagagagggatatcatggccatattttaaggtcatttctcgtcacctctttaaccttcagttttctcaacttatgaaataaagggactgagcaggtagccttgggagagatgcccaaagtggatgaagggtgtagggtcctcccatcttactcttctcacccccaaaccagtgtttcacattttcttcttttcaaagaagaactggtacatgggtcctggctcaaagacttccaatggatcacccatgtaaagcggttcaaaagaaacccttgtgggactgataaaacccttgtcggactttttatcctgtgtgataaaaatcccacaggaaggagacacccccccccaaaaaaaaaaaaaaaacacagggcaaccctttctctgccctctgaatacagctatcctcattctcccnnnnnnnnnnnnnnnntttaagctttgcatcattgctgggag

SEQ ID NO: 1505 - DNA, 547 bp, Mus musculus; identical to SEQ ID NO: 1504
  misc_feature (506)..(521): n is a, c, g, or t

SEQ ID NO: 1506 - DNA, 566 bp, Mus musculus
  misc_feature (46)..(75): n is a, c, g, or t
  misc_feature (350)..(351): n is a, c, g, or t
  misc_feature (434)..(438): n is a, c, g, or t
  misc_feature (446)..(446): n is a, c, g, or t
  misc_feature (448)..(452): n is a, c, g, or t
  misc_feature (454)..(454): n is a, c, g, or t
  misc_feature (456)..(456): n is a, c, g, or t
  misc_feature (458)..(466): n is a, c, g, or t
aagagttctttgcacaattgtcccattgtttgacacccagtgtacnnnnnnnnnnnnnnnnnnnnnnnnnnnnnnacacttgtatgctgtaacctcatctacttctgatggtttttttaaaactatgatgactctaagattacaaaaacaactaacttttgctttgttttcttgaaaaaaaaatgtcaacagtgtgaattttttctttaaatttgtgtagcatacgcagttttggtaaaggaaggcaacaggtattggggtctatttaaaccccccctcccacaagacaagtctcttctgtgtgaaattttctgtacgttccatgtgcagagaaaagcctcccccctctnncccccgccagcccagtggtacttctaaattgtcttgttttgtttttgttttattttttttaaataaactgacagatgacaaannnnnaaaaaaanannnnnananannnnnnnnnctcgcgggggaggaagcgcgccgtcctagagagcgggttgtagggtgtagcccgcgttgggtaggggtttcggacgcctgctcacgtgtagtcgacaagg

SEQ ID NO: 1507 - DNA, 566 bp, Mus musculus; identical to SEQ ID NO: 1506
  misc_feature (46)..(75): n is a, c, g, or t
  misc_feature (350)..(351): n is a, c, g, or t
  misc_feature (434)..(438): n is a, c, g, or t
  misc_feature (446)..(446): n is a, c, g, or t
  misc_feature (448)..(452): n is a, c, g, or t
  misc_feature (454)..(454): n is a, c, g, or t
  misc_feature (456)..(456): n is a, c, g, or t
  misc_feature (458)..(466): n is a, c, g, or t

SEQ ID NO: 1508 - DNA, 318 bp, Mus musculus
  misc_feature (26)..(26): n is a, c, g, or t
  misc_feature (293)..(293): n is a, c, g, or t
cgagcatacccctggaagctggcggnacggcctccccaccacgcctgtgcaagacactcaacggggctccgtgtcccagctttcctttccttggctctctggggttagttcaggggaggtggagtcctctgctgaccctgtctggaagatttggctctagctgaggaaggagtcttttagttgagggaagtcaccccaaaccccagctcccactttcaggggcacctctcagatggccatgctcagtatcccttccagacaggccctcccctctctagcgccccctctgtggnctcctagggctgaacacattctttg

SEQ ID NO: 1509 - DNA, 318 bp, Mus musculus; identical to SEQ ID NO: 1508
  misc_feature (26)..(26): n is a, c, g, or t
  misc_feature (293)..(293): n is a, c, g, or t

SEQ ID NO: 1510 - DNA, 347 bp, Mus musculus
ccgcagttgtccagaagcgctttggcttccctgaaggcagcgtagagctttatgcagagaaagtggccacaagaggtctgtgtgccattgcccaggcagagtctctacgctacaaactccttggagggcttgcggttcgaagggcctgctatggtgtgcttcggttcattatggagagtggggccaagggctgcgaggttgtggtgtctgggaagctccgaggacagagggccaagtccatgaagtttgtggatggtctgatgattcacagtggagaccctgttaactactatgtcgacacagccgtgcgccatgtgctcctcagacagggtgtgctgggcatcaaa

SEQ ID NO: 1511 - DNA, 347 bp, Mus musculus; identical to SEQ ID NO: 1510

SEQ ID NO: 1512 - DNA, 532 bp, Mus musculus
  misc_feature (40)..(61): n is a, c, g, or t
  misc_feature (347)..(362): n is a, c, g, or t
  misc_feature (379)..(412): n is a, c, g, or t
ttcagagccaatgtctccatcaggccttcactatcatggnnnnnnnnnnnnnnnnnnnnnntgacaaggaggacctgagggacacctttgctgcactgggtcgcataaatgtcaagaacgaggaattggaagccatggtgaaggaggctccggggcccatcaacttcacagtcttcctgaccatgtttggggagaaactcaagggcacggacccagaagagactatactgcacgccttcaaagtgtttgacactgaaggaaaaggctttgtcaaggctgacttcattaaggaaaagcttatgacgcaggctgaccggttcagtgaggaggaggtcaagcagatgttnnnnnnnnnnnnnnnngatgtctgtggcaactnnnnnnnnnnnnnnnnnnnnnnnnnnnnnnnnnncggcgaggagaaggactagatgtgtctcctccatacctggagtcagccaagatggggtggggtgggcagggggcagtacagggctagcataggtagggaaacagtttccatcactcccag

SEQ ID NO: 1513 - DNA, 532 bp, Mus musculus; identical to SEQ ID NO: 1512
  misc_feature (40)..(61): n is a, c, g, or t
  misc_feature (347)..(362): n is a, c, g, or t
  misc_feature (379)..(412): n is a, c, g, or t

SEQ ID NO: 1514 - DNA, 398 bp, Mus musculus
  misc_feature (372)..(372): n is a, c, g, or t
gctctacatccttctgcggaatggggtgagtgaggagaacctggccaagctgatccagcatgccaacgtgcagtcgtacagcagcctcatccggaatctggagcagctgggcggcactgtcaccaactccgcgggctcagggacctctagccggctggagcggagagagcgcatggagcccacctaccagctgtctcgctggtccccagtcatcaaggatgtgatggaggatgtggtggaggaccggctagaccgaaagctgtggccctttgtgtctgaccctgcccctgtgcctagctcccaggcagctgtcagcgctcgctttggccactggcacaaaaacaaagctggagtagaggcccgggctgggcntaggctcatcgtgtacattgtgggtg

SEQ ID NO: 1515 - DNA, 398 bp, Mus musculus; identical to SEQ ID NO: 1514
  misc_feature (372)..(372): n is a, c, g, or t

SEQ ID NO: 1516 - DNA, 591 bp, Mus musculus
  misc_feature (309)..(328): n is a, c, g, or t
  misc_feature (365)..(365): n is a, c, g, or t
  misc_feature (367)..(367): n is a, c, g, or t
  misc_feature (369)..(387): n is a, c, g, or t
  misc_feature (390)..(390): n is a, c, g, or t
  misc_feature (392)..(393): n is a, c, g, or t
  misc_feature (397)..(397): n is a, c, g, or t
  misc_feature (406)..(406): n is a, c, g, or t
  misc_feature (414)..(414): n is a, c, g, or t
  misc_feature (417)..(417): n is a, c, g, or t
  misc_feature (422)..(422): n is a, c, g, or t
  misc_feature (424)..(424): n is a, c, g, or t
  misc_feature (426)..(426): n is a, c, g, or t
  misc_feature (428)..(428): n is a, c, g, or t
  misc_feature (430)..(430): n is a, c, g, or t
  misc_feature (451)..(452): n is a, c, g, or t
  misc_feature (455)..(455): n is a, c, g, or t
  misc_feature (457)..(457): n is a, c, g, or t
  misc_feature (461)..(463): n is a, c, g, or t
  misc_feature (531)..(531): n is a, c, g, or t
  misc_feature (533)..(533): n is a, c, g, or t
ggcacctatatctcatccccaggaaacgaagaggaagaatcaaaaaccttcactactcttgaccctgcgtccctagcttggctgacagaggagccagggccaacagaggtcacacgcacatcccaaagccctcgctctccagattccagtcagagttctatggcccaggaggaagaggaggaagagcaaggaagaactaggaaacggaaacagagtggtcagtgcccagcccggcctgggaagcaacgcatgaaggagaaggagcaggagaacgagcggaaagtggcacagctagctgaagagaacgannnnnnnnnnnnnnnnnnnnagcgcctgaccagggaggtggagaccacacggcgggntntnnnnnnnnnnnnnnnnnnnctncnncaancatgaacantgggcatnacntcctntntntntntccggaagtgtacccagcacnntcncnccannnccaagcatgtgaccctgcactgcactgcacatgctgaggaggggactgagggtagaccaggagagggntnggcttgcacatagacggtacattgtttattactgtccatgtccagtaaagtgactttg

SEQ ID NO: 1517 - DNA, 591 bp, Mus musculus; identical to SEQ ID NO: 1516
  misc_feature (309)..(328): n is a, c, g, or t
  misc_feature (365)..(365): n is a, c, g, or t
  misc_feature (367)..(367): n is a, c, g, or t
  misc_feature (369)..(387): n is a, c, g, or t
  misc_feature (390)..(390): n is a, c, g, or t
  misc_feature (392)..(393): n is a, c, g, or t
  misc_feature (397)..(397): n is a, c, g, or t
  misc_feature (406)..(406): n is a, c, g, or t
  misc_feature (414)..(414): n is a, c, g, or t
  misc_feature (417)..(417): n is a, c, g, or t
  misc_feature (422)..(422): n is a, c, g, or t
  misc_feature (424)..(424): n is a, c, g, or t
  misc_feature (426)..(426): n is a, c, g, or t
  misc_feature (428)..(428): n is a, c, g, or t
  misc_feature (430)..(430): n is a, c, g, or t
  misc_feature (451)..(452): n is a, c, g, or t
  misc_feature (455)..(455): n is a, c, g, or t
  misc_feature (457)..(457): n is a, c, g, or t
  misc_feature (461)..(463): n is a, c, g, or t
  misc_feature (531)..(531): n is a, c, g, or t
  misc_feature (533)..(533): n is a, c, g, or t

SEQ ID NO: 1518 - DNA, 211 bp, Mus musculus
  misc_feature (60)..(60): n is a, c, g, or t
  misc_feature (89)..(89): n is a, c, g, or t
  misc_feature (110)..(110): n is a, c, g, or t
  misc_feature (115)..(115): n is a, c, g, or t
  misc_feature (118)..(118): n is a, c, g, or t
  misc_feature (168)..(168): n is a, c, g, or t
gaaagagagcacgtcaggagatgactctgtcatgatagagtgttcagccaaggatatttnagttaagggagtggatgagtcaggtgccnacagattcacagtactgtttncctcnggnaccccgctgccagcccgaagacagcacacactgcaggcccccgggagggngtcttccgtttgccttgaactctatgagtctgaggggaagaac

SEQ ID NO: 1519 - DNA, 211 bp, Mus musculus; identical to SEQ ID NO: 1518
  misc_feature (60)..(60): n is a, c, g, or t
  misc_feature (89)..(89): n is a, c, g, or t
  misc_feature (110)..(110): n is a, c, g, or t
  misc_feature (115)..(115): n is a, c, g, or t
  misc_feature (118)..(118): n is a, c, g, or t
  misc_feature (168)..(168): n is a, c, g, or t

SEQ ID NO: 1520 - DNA, 516 bp, Mus musculus
  misc_feature (98)..(422): n is a, c, g, or t
  misc_feature (425)..(481): n is a, c, g, or t
aaggcagaggcagaggcatgaggcaggaggcagaggcgacagagcagggacagggacagagacagagacagagatagagatagaattagagatgattnnnnnnnnnnnnnnnnnnnnnnnnnnnnnnnnnnnnnnnnnnnnnnnnnnnnnnnnnnnnnnnnnnnnnnnnnnnnnnnnnnnnnnnnnnnnnnnnnnnnnnnnnnnnnnnnnnnnnnnnnnnnnnnnnnnnnnnnnnnnnnnnnnnnnnnnnnnnnnnnnnnnnnnnnnnnnnnnnnnnnnnnnnnnnnnnnnnnnnnnnnnnnnnnnnnnnnnnnnnnnnnnnnnnnnnnnnnnnnnnnnnnnnnnnnnnnnnnnnnnnnnnnnnnnnnnnnnnnnnnnnnnnnnnnnnnnnnnnnnnnnnnnnnnnnnnnnnnnnnnnnnnntcnnnnnnnnnnnnnnnnnnnnnnnnnnnnnnnnnnnnnnnnnnnnnnnnnnnnnnnnncattgggtgctaggatctggtaggagttagggaga

SEQ ID NO: 1521 - DNA, 516 bp, Mus musculus; identical to SEQ ID NO: 1520
  misc_feature (98)..(422): n is a, c, g, or t
  misc_feature (425)..(481): n is a, c, g, or t

SEQ ID NO: 1522 - DNA, 554 bp, Mus musculus
  misc_feature (98)..(135): n is a, c, g, or t
  misc_feature (252)..(252): n is a, c, g, or t
  misc_feature (298)..(298): n is a, c, g, or t
  misc_feature (303)..(303): n is a, c, g, or t
  misc_feature (318)..(318): n is a, c, g, or t
  misc_feature (320)..(320): n is a, c, g, or t
  misc_feature (410)..(410): n is a, c, g, or t
  misc_feature (421)..(421): n is a, c, g, or t
  misc_feature (458)..(458): n is a, c, g, or t
  misc_feature (468)..(468): n is a, c, g, or t
  misc_feature (471)..(471): n is a, c, g, or t
agtatagggcagagacctgtgccagcgagtcggcctaagccccaaccacggacacatggcccgaggtgccgggcactgtaccaatacataggccaggnnnnnnnnnnnnnnnnnnnnnnnnnnnnnnnnnnnnnngagatcctcatagaagactcatctggctggtggaagggtcggcttcatggccaggaaggtctctttccaggaaactatgtggagaagatctgatcgtccatccaccagcctgcctgnttgcctgcctgggatccaaaccctgccagtggaagccttggttatnttatntgcactggccagaanantcaggctgtggcctcaagcccagtgggacccctgtgtatggaggatgagcactgtagcaccccatgcctggtactgccttcctgtgggtngacttgctatntaagtttccattttttcctgtgtccaatagtagttgntgcaaaaccnacntcccagctgccttgtgtgtatgtaacaaatcatgtcctgccctgggagcaaagtgctgtgcactgcccagagttaggagacgt

SEQ ID NO: 1523 - DNA, 554 bp, Mus musculus; identical to SEQ ID NO: 1522
  misc_feature (98)..(135): n is a, c, g, or t
  misc_feature (252)..(252): n is a, c, g, or t
  misc_feature (298)..(298): n is a, c, g, or t
  misc_feature (303)..(303): n is a, c, g, or t
  misc_feature (318)..(318): n is a, c, g, or t
  misc_feature (320)..(320): n is a, c, g, or t
  misc_feature (410)..(410): n is a, c, g, or t
  misc_feature (421)..(421): n is a, c, g, or t
  misc_feature (458)..(458): n is a, c, g, or t
  misc_feature (468)..(468): n is a, c, g, or t
  misc_feature (471)..(471): n is a, c, g, or t

SEQ ID NO: 1524 - DNA, 148 bp, Mus musculus
ctgtgggatcaattgcagtgctctgctgcaggatgacatcactgcagccatacaatgtgcaaagagggtggtgagagatccccaaggcattcgagcatgggtggcatggcgaacacaatgtcaaaaccgagatctgtcccagtatatt

SEQ ID NO: 1525 - DNA, 148 bp, Mus musculus; identical to SEQ ID NO: 1524

SEQ ID NO: 1526 - DNA, 494 bp, Mus musculus
  misc_feature (35)..(36): n is a, c, g, or t
  misc_feature (38)..(38): n is a, c, g, or t
  misc_feature (40)..(40): n is a, c, g, or t
  misc_feature (43)..(43): n is a, c, g, or t
  misc_feature (46)..(47): n is a, c, g, or t
  misc_feature (51)..(51): n is a, c, g, or t
  misc_feature (56)..(56): n is a, c, g, or t
  misc_feature (58)..(58): n is a, c, g, or t
  misc_feature (65)..(65): n is a, c, g, or t
  misc_feature (69)..(69): n is a, c, g, or t
  misc_feature (71)..(71): n is a, c, g, or t
  misc_feature (74)..(74): n is a, c, g, or t
  misc_feature (97)..(111): n is a, c, g, or t
  misc_feature (152)..(152): n is a, c, g, or t
  misc_feature (183)..(183): n is a, c, g, or t
  misc_feature (226)..(240): n is a, c, g, or t
  misc_feature (252)..(252): n is a, c, g, or t
  misc_feature (254)..(254): n is a, c, g, or t
  misc_feature (339)..(356): n is a, c, g, or t
  misc_feature (358)..(360): n is a, c, g, or t
  misc_feature (363)..(363): n is a, c, g, or t
  misc_feature (392)..(392): n is a, c, g, or t
  misc_feature (427)..(427): n is a, c, g, or t
  misc_feature (445)..(445): n is a, c, g, or t
  misc_feature (463)..(463): n is a, c, g, or t
agagacgccccagaaccacaaggcgaagaggcagnngngnggnccnngaancccancntttctgngagnanaancagcacattggcctgggacaggnnnnnnnnnnnnnnntcagtggcttcctgggtcactcacctgcaggcgtccttcanaagagccaacagagcactctggctcacgggnctcatcatcatactgatcgcagcgctgatgagcttcctcacannnnnnnnnnnnnnnacagccgtggangntgcgcccacacaggagggggactcctggctgtctctagaacacatcttatggccatttaccagactcgggcatgatggaccactnnnnnnnnnnnnnnnnnncnnntcnatgtacccttggattttaacgtttccttntgagatttgtaaattggtaacttttttttagtaantatagtgcaaagctaggntcctcagcagctgggatntttttattccccaacaaaagcacaggggact

SEQ ID NO: 1527 - DNA, 494 bp, Mus musculus; identical to SEQ ID NO: 1526
  misc_feature (35)..(36): n is a, c, g, or t
  misc_feature (38)..(38): n is a, c, g, or t
  misc_feature (40)..(40): n is a, c, g, or t
  misc_feature (43)..(43): n is a, c, g, or t
  misc_feature (46)..(47): n is a, c, g, or t
  misc_feature (51)..(51): n is a, c, g, or t
  misc_feature (56)..(56): n is a, c, g, or t
  misc_feature (58)..(58): n is a, c, g, or t
  misc_feature (65)..(65): n is a, c, g, or t
  misc_feature (69)..(69): n is a, c, g, or t
  misc_feature (71)..(71): n is a, c, g, or t
  misc_feature (74)..(74): n is a, c, g, or t
  misc_feature (97)..(111): n is a, c, g, or t
  misc_feature (152)..(152): n is a, c, g, or t
  misc_feature (183)..(183): n is a, c, g, or t
  misc_feature (226)..(240): n is a, c, g, or t
  misc_feature (252)..(252): n is a, c, g, or t
  misc_feature (254)..(254): n is a, c, g, or t
  misc_feature (339)..(356): n is a, c, g, or t
  misc_feature (358)..(360): n is a, c, g, or t
  misc_feature (363)..(363): n is a, c, g, or t
  misc_feature (392)..(392): n is a, c, g, or t
  misc_feature (427)..(427): n is a, c, g, or t
  misc_feature (445)..(445): n is a, c, g, or t
  misc_feature (463)..(463): n is a, c, g, or t

SEQ ID NO: 1528 - DNA, 506 bp, Mus musculus
  misc_feature (303)..(303): n is a, c, g, or t
tccacagatacctgaagaacgggaacgcgacgctgctgcgcacagattccccaaaggcacatgtgacccatcaccccagatctaaaggtgaagtcaccctgaggtgctgggccctgggcttctaccctgctgacatcaccctgacctggcagttgaatggggaggagctgacccaggacatggagcttgtggagaccaggcctgcaggggatggaaccttccagaagtgggcatctgtggtggtgcctcttgggaaggagcagaattacacatgccgtgtgtaccatgaggggctgcctgagnccctcaccctgagatgggagcctcctccgtccactgactcttacatggtgatcgttgctgttctgggtgtccttggagctatggccatcattggagctgtggtggcttttgtgatgaagagaaggagaaacacaggtggaaaaggaggggactatgctctggctccaggctcccagagctctgaaatgtctctccgagattgt

SEQ ID NO: 1529 - DNA, 506 bp, Mus musculus; identical to SEQ ID NO: 1528
  misc_feature (303)..(303): n is a, c, g, or t

SEQ ID NO: 1530 - DNA, 431 bp, Mus musculus
  misc_feature (82)..(82): n is a, c, g, or t
  misc_feature (131)..(131): n is a, c, g, or t
  misc_feature (142)..(142): n is a, c, g, or t
  misc_feature (144)..(144): n is a, c, g, or t
  misc_feature (167)..(167): n is a, c, g, or t
  misc_feature (176)..(176): n is a, c, g, or t
  misc_feature (194)..(194): n is a, c, g, or t
  misc_feature (197)..(197): n is a, c, g, or t
  misc_feature (199)..(199): n is a, c, g, or t
  misc_feature (204)..(204): n is a, c, g, or t
  misc_feature (208)..(208): n is a, c, g, or t
  misc_feature (217)..(217): n is a, c, g, or t
  misc_feature (221)..(221): n is a, c, g, or t
  misc_feature (224)..(224): n is a, c, g, or t
  misc_feature (235)..(235): n is a, c, g, or t
  misc_feature (240)..(241): n is a, c, g, or t
  misc_feature (266)..(266): n is a, c, g, or t
  misc_feature (268)..(268): n is a, c, g, or t
  misc_feature (270)..(270): n is a, c, g, or t
  misc_feature (326)..(326): n is a, c, g, or t
  misc_feature (337)..(337): n is a, c, g, or t
  misc_feature (339)..(339): n is a, c, g, or t
  misc_feature (367)..(367): n is a, c, g, or t
cttatggtaaatttgcctgatttcttacaggctacgtttggaaactttttattatatagttgtttacatacttataagtctntcatttaaagacgtgtactgaaacaaatgttgtatttgtttcatgagcntcttcctgtantntattataaagttgaaattaaacntagagaatnttttaacagttttttaantcnanatttntcantcatttttnatanttntttttttatanaaagnnaaaggaatttaaggacaggcaatantntnttaaaatttattcacaagaacccattaactgcacagttgcccttagctgcctgttntaaaatgatgntntttttattgaaacacaaataaacttttntgtaatattttatggaatataaagagactttaattgtttgacttgtttaactaagcactgttag

SEQ ID NO: 1531 - DNA, 431 bp, Mus musculus; identical to SEQ ID NO: 1530
  misc_feature (82)..(82): n is a, c, g, or t
  misc_feature (131)..(131): n is a, c, g, or t
  misc_feature (142)..(142): n is a, c, g, or t
  misc_feature (144)..(144): n is a, c, g, or t
  misc_feature (167)..(167): n is a, c, g, or t
  misc_feature (176)..(176): n is a, c, g, or t
  misc_feature (194)..(194): n is a, c, g, or t
  misc_feature (197)..(197): n is a, c, g, or t
  misc_feature (199)..(199): n is a, c, g, or t
  misc_feature (204)..(204): n is a, c, g, or t
  misc_feature (208)..(208): n is a, c, g, or t
  misc_feature (217)..(217): n is a, c, g, or t
  misc_feature (221)..(221): n is a, c, g, or t
  misc_feature (224)..(224): n is a, c, g, or t
  misc_feature (235)..(235): n is a, c, g, or t
  misc_feature (240)..(241): n is a, c, g, or t
  misc_feature (266)..(266): n is a, c, g, or t
  misc_feature (268)..(268): n is a, c, g, or t
  misc_feature (270)..(270): n is a, c, g, or t
  misc_feature (326)..(326): n is a, c, g, or t
  misc_feature (337)..(337): n is a, c, g, or t
  misc_feature (339)..(339): n is a, c, g, or t
  misc_feature (367)..(367): n is a, c, g, or t

SEQ ID NO: 1532 - DNA, 477 bp, Mus musculus
  misc_feature (95)..(95): n is a, c, g, or t
  misc_feature (144)..(144): n is a, c, g, or t
  misc_feature (155)..(155): n is a, c, g, or t
  misc_feature (157)..(157): n is a, c, g, or t
  misc_feature (180)..(180): n is a, c, g, or t
  misc_feature (189)..(189): n is a, c, g, or t
  misc_feature (207)..(207): n is a, c, g, or t
  misc_feature (210)..(210): n is a, c, g, or t
  misc_feature (212)..(212): n is a, c, g, or t
  misc_feature (217)..(217): n is a, c, g, or t
  misc_feature (221)..(221): n is a, c, g, or t
  misc_feature (230)..(230): n is a, c, g, or t
  misc_feature (234)..(234): n is a, c, g, or t
  misc_feature (237)..(237): n is a, c, g, or t
  misc_feature (248)..(248): n is a, c, g, or t
  misc_feature (253)..(254): n is a, c, g, or t
  misc_feature (279)..(279): n is a, c, g, or t
  misc_feature (281)..(281): n is a, c, g, or t
  misc_feature (283)..(283): n is a, c, g, or t
  misc_feature (339)..(339): n is a, c, g, or t
  misc_feature (350)..(350): n is a, c, g, or t
  misc_feature (352)..(352): n is a, c, g, or t
  misc_feature (380)..(380): n is a, c, g, or t
tttagaaagtttgcttatggtaaatttgcctgatttcttacaggctacgtttggaaactttttattatatagttgtttacatacttataagtctntcatttaaagacgtgtactgaaacaaatgttgtatttgtttcatgagcntcttcctgtantntattataaagttgaaattaaacntagagaatnttttaacagttttttaantcnanatttntcantcatttttnatanttntttttttatanaaagnnaaaggaatttaaggacaggcaatantntnttaaaatttattcacaagaacccattaactgcacagttgcccttagctgcctgttntaaaatgatgntntttttattgaaacacaaataaacttttntgtaatattttatggaatataaagagactttaattgtttgacttgtttaactaagcactgttagtttttattaataaaacgcgcatgggcattttaa

SEQ ID NO: 1533 - DNA, 477 bp, Mus musculus; identical to SEQ ID NO: 1532
  misc_feature (95)..(95): n is a, c, g, or t
  misc_feature (144)..(144): n is a, c, g, or t
  misc_feature (155)..(155): n is a, c, g, or t
  misc_feature (157)..(157): n is a, c, g, or t
  misc_feature (180)..(180): n is a, c, g, or t
  misc_feature (189)..(189): n is a, c, g, or t
  misc_feature (207)..(207): n is a, c, g, or t
  misc_feature (210)..(210): n is a, c, g, or t
  misc_feature (212)..(212): n is a, c, g, or t
  misc_feature (217)..(217): n is a, c, g, or t
  misc_feature (221)..(221): n is a, c, g, or t
  misc_feature (230)..(230): n is a, c, g, or t
  misc_feature (234)..(234): n is a, c, g, or t
  misc_feature (237)..(237): n is a, c, g, or t
  misc_feature (248)..(248): n is a, c, g, or t
  misc_feature (253)..(254): n is a, c, g, or t
  misc_feature (279)..(279): n is a, c, g, or t
  misc_feature (281)..(281): n is a, c, g, or t
  misc_feature (283)..(283): n is a, c, g, or t
  misc_feature (339)..(339): n is a, c, g, or t
  misc_feature (350)..(350): n is a, c, g, or t
  misc_feature (352)..(352): n is a, c, g, or t
  misc_feature (380)..(380): n is a, c, g, or t

SEQ ID NO: 1534 - DNA, 278 bp, Mus musculus
  misc_feature (54)..(54): n is a, c, g, or t
  misc_feature (70)..(181): n is a, c, g, or t
tccctccaggaactgaatccagaaatggggacagacaatgacagtgagaactgnaaggaggtgcataagnnnnnnnnnnnnnnnnnnnnnnnnnnnnnnnnnnnnnnnnnnnnnnnnnnnnnnnnnnnnnnnnnnnnnnnnnnnnnnnnnnnnnnnnnnnnnnnnnnnnnnnnnnnnnnnntctcccggattcaccccgtgtctaccatggtgaagggaatgtacggcattgagaatgaagtcttcctcagtctcccgtgcatcctcaatgctcgggg

SEQ ID NO: 1535 - DNA, 278 bp, Mus musculus; identical to SEQ ID NO: 1534
  misc_feature (54)..(54): n is a, c, g, or t
  misc_feature (70)..(181): n is a, c, g, or t

SEQ ID NO: 1536 - DNA, 277 bp, Mus musculus
  misc_feature (59)..(59): n is a, c, g, or t
  misc_feature (154)..(154): n is a, c, g, or t
  misc_feature (179)..(212): n is a, c, g, or t
  misc_feature (229)..(245): n is a, c, g, or t
caagggctcagcttcggttggtgcagattaacttttcctgatggacaggatcagttaanttccaactgaacaccctggagcgtatgaaagatatgtgacatcagtaatatcatggtgcagaggactaacacagactagcccaagacaggtgccnacacatctctcacctgctctcaaannnnnnnnnnnnnnnnnnnnnnnnnnnnnnnnnntacagaaatttaactgnnnnnnnnnnnnnnnnngtgtcctcaacctaacttctagcaagaatgag

SEQ ID NO: 1537 - DNA, 277 bp, Mus musculus; identical to SEQ ID NO: 1536
  misc_feature (59)..(59): n is a, c, g, or t
  misc_feature (154)..(154): n is a, c, g, or t
  misc_feature (179)..(212): n is a, c, g, or t
  misc_feature (229)..(245): n is a, c, g, or t

SEQ ID NO: 1538 - DNA, 518 bp, Mus musculus
gtattacaaggcttacatggagggcgagtgcgtgcagtcgctccgcagatacctggagctcgggaaggagacgctgctgcgcacagatcccccaaaggcacatgtgacccatcaccccagatctgaaggtaaagtaactctgaggtgctgggccctaggcttctaccctgctgacatcaccctgacctggcagttgaatggggaggagctgacccaggacatggagcttgtggagaccaggcctgcaggggatggaaccttccagaagtgggcagctgtggtggtgcctcttgggaaggagcagaattacacatgccatgtgcaccatgaggggctgcctgagcccctcaccctgagatgggagcctcctccatccactgtctccaacatggtaatcattgctgttctggttgtccttggagctgtgatcatcattggagctgtggtggcttttgtgatgaaaagagggagaaacacaggtggaaaagtaagagacaaccctcaggatccaggcagag

SEQ ID NO: 1539 - DNA, 518 bp, Mus musculus; identical to SEQ ID NO: 1538

SEQ ID NO: 1540 - DNA, 436 bp, Mus musculus
  misc_feature (77)..(105): n is a, c, g, or t
  misc_feature (167)..(182): n is a, c, g, or t
  misc_feature (185)..(211): n is a, c, g, or t
tcggaaaccgcctcgggcaggtgcacgtgctgctgggtgtggccaagtgctggatggcccggaaggtgcaagacaannnnnnnnnnnnnnnnnnnnnnnnnnnnnacttagctgaagaggttggcaataagctgagccagctcaagctgcattgcctgagtgagagnnnnnnnnnnnnnnnnggnnnnnnnnnnnnnnnnnnnnnnnnnnnagtgaggttccacgagtgcgtggaggagactgagctctactgcggcctctgtggtgagtccatcggggagaggaacagccggctgcaggccctgccctgctcccacatctttcatctcagatgcctgcaaaacaatggcactaggagctgccccaactgccgccgctcctccatgaagccgggctttgtgtgacttcagcggccatcttgggtttccacacaacc

SEQ ID NO: 1541 - DNA, 436 bp, Mus musculus; identical to SEQ ID NO: 1540
  misc_feature (77)..(105): n is a, c, g, or t
  misc_feature (167)..(182): n is a, c, g, or t
  misc_feature (185)..(211): n is a, c, g, or t

SEQ ID NO: 1542 - DNA, 565 bp, Mus musculus
cactgattctgtaatatgtgcacaactagatgtgtgttatattgatatcttcagggtctgcactgtgaactgccctggagatcatggccactttaaaaacagaagttcttttgaaacttcatttactactctgctttaagaaagacctactttgtagctgaattatatgttctttcctagagtaatagtaagcagctagtatgttcaaatctttcaaaacaaaagtcaaggaaaaaatatcttcaagctggcaatgtatttatttaaattgcggttttttgattgttggtctaggttgtgtgtttctcttttatgtagcgccttttaagaaatactggggtttttttgtgtgtgtgtgtcggtgaaagcacaagtgtttttgatgtatatagcaagaagagaaaaaagtttccagatagctttgctgcataggataattgctactgagcctttcttataccatctgtggaaaggaaggatgaagcttactctgtaggttcattctgatcaacaatatcttctgttgtttgtgcatagcaatggactattactgctttatcatttg

SEQ ID NO: 1543 - DNA, 565 bp, Mus musculus; identical to SEQ ID NO: 1542

SEQ ID NO: 1544 - DNA, 551 bp, Mus musculus
  misc_feature (335)..(335): n is a, c, g, or t
  misc_feature (437)..(437): n is a, c, g, or t
actacgtgaagtgtccgcctctctccacacactcgctctgcatgactagtgcagtgaactccctcgtgcttttgagatgttctcgtgttccctggactgctgggcttccctcccgtgctagctaagatggttcctgcttatgtgggaggcatgtcacacccgtgcacgctgcccacaccgcgatccctaccacctgcccgaaggtcaacttctacatgagaccaagagcaaaggtagaggttccaagggagtcccttggcgctccccatgctaacagctgtgtatcccgcagattaggtcattgtctgttcctaaagaactaggctttgaatatntaagatgctgttctcaatcattttcagagatatttccaagttgcaatcaggagagcttttctaatcggaagtcaaatcattcctggggtggctgtgatatgntctgagtgtaattaatttgctctgtggtaagagatatgctaatcattgccacttggtagatgccgttaaaaccttatgaaagatacatatggaaatctgtacatccctaaacag

SEQ ID NO: 1545 - DNA, 551 bp, Mus musculus; identical to SEQ ID NO: 1544
  misc_feature (335)..(335): n is a, c, g, or t
  misc_feature (437)..(437): n is a, c, g, or t

SEQ ID NO: 1546 - DNA, 320 bp, Mus musculus
  misc_feature (35)..(35): n is a, c, g, or t
  misc_feature (61)..(61): n is a, c, g, or t
tgctcctgaccctcggactatggggcgtcctcctnctggacctgactcctgagccggcagnccctggctggacccagggtcttttgactccctcccccctgctccatctttgaggatgtgtgtgccctcgtgttgtcttctttggacctcagtttttccatgaaccagaagagaattggaacaagggctgcgggcagcaggggcctcttagttgagataatattgttgctgttattattattattatcattgttattgctctaatttattatataaatatatatataaaagatttttgtaccagtgaacaaggttgggtc

SEQ ID NO: 1547 - DNA, 320 bp, Mus musculus; identical to SEQ ID NO: 1546
  misc_feature (35)..(35): n is a, c, g, or t
  misc_feature (61)..(61): n is a, c, g, or t

SEQ ID NO: 1548 - DNA, 316 bp, Mus musculus
  misc_feature (49)..(49): n is a, c, g, or t
  misc_feature (152)..(152): n is a, c, g, or t
  misc_feature (154)..(154): n is a, c, g, or t
  misc_feature (176)..(176): n is a, c, g, or t
  misc_feature (182)..(182): n is a, c, g, or t
  misc_feature (184)..(185): n is a, c, g, or t
  misc_feature (188)..(188): n is a, c, g, or t
  misc_feature (213)..(213): n is a, c, g, or t
  misc_feature (222)..(239): n is a, c, g, or t
gtcaattttcgcattcttagtagaagaaccagtctgtggttcaacaggncattcctgatggtcatctctcacacagatgttcagactactctctttatagccaaaatcactcaccctaagagagcctaaaactctccaagttctgaatattntncccaggactctgagatggaccntatatntnnatntctgtttacatcctggcattcaagntctgattgnnnnnnnnnnnnnnnnnntagacagcgacattgactatctccgtggctcccacatgcacagaagactttggactatctgtgtcaggctctcgggt

SEQ ID NO: 1549 - DNA, 316 bp, Mus musculus; identical to SEQ ID NO: 1548
  misc_feature (49)..(49): n is a, c, g, or t
  misc_feature (152)..(152): n is a, c, g, or t
  misc_feature (154)..(154): n is a, c, g, or t
  misc_feature (176)..(176): n is a, c, g, or t
  misc_feature (182)..(182): n is a, c, g, or t
  misc_feature (184)..(185): n is a, c, g, or t
  misc_feature (188)..(188): n is a, c, g, or t
  misc_feature (213)..(213): n is a, c, g, or t
  misc_feature (222)..(239): n is a, c, g, or t

SEQ ID NO: 1550 - DNA, 596 bp, Mus musculus
  misc_feature (26)..(55): n is a, c, g, or t
  misc_feature (170)..(171): n is a, c, g, or t
  misc_feature (174)..(174): n is a, c, g, or t
  misc_feature (176)..(178): n is a, c, g, or t
  misc_feature (232)..(232): n is a, c, g, or t
  misc_feature (335)..(335): n is a, c, g, or t
  misc_feature (337)..(337): n is a, c, g, or t
  misc_feature (359)..(359): n is a, c, g, or t
  misc_feature (365)..(365): n is a, c, g, or t
  misc_feature (367)..(368): n is a, c, g, or t
  misc_feature (371)..(371): n is a, c, g, or t
  misc_feature (396)..(396): n is a, c, g, or t
  misc_feature (405)..(422): n is a, c, g, or t
  misc_feature (500)..(500): n is a, c, g, or t
  misc_feature (518)..(532): n is a, c, g, or t
  misc_feature (540)..(540): n is a, c, g, or t
  misc_feature (564)..(564): n is a, c, g, or t
catctctactgactacagcctgaagnnnnnnnnnnnnnnnnnnnnnnnnnnnnnnatcttctccaaacaagctgacctatctgggatcacaggaaccaaggacctgatagtgtctcagatggtccacaaggctgtgctggacgtggctgagacaggcacagaaggagttnngcngnnncaggggtcaattttcgcattcttagtagaagaaccagtctgtggttcaacaggncattcctgatggtcatctctcacacagatgttcagactactctctttatagccaaaatcactcaccctaagagagcctaaaactctccaagttctgaatattntncccaggactctgagatggaccntatatntnnatntctgtttacatcctggcattcaagntctgattgnnnnnnnnnnnnnnnnnntagacagcgacattgactatctccgtggctcccacatgcacagaagactttggactatctgtgtcaggctctcgggtntcttgggagcatctgtgnnnnnnnnnnnnnnnggaatctncctttattcttcttccctggtgantcctctttatgtatctgtatcccaaacctagg

SEQ ID NO: 1551 - DNA, 596 bp, Mus musculus; identical to SEQ ID NO: 1550
  misc_feature (26)..(55): n is a, c, g, or t
  misc_feature (170)..(171): n is a, c, g, or t
  misc_feature (174)..(174): n is a, c, g, or t
  misc_feature (176)..(178): n is a, c, g, or t
  misc_feature (232)..(232): n is a, c, g, or t
  misc_feature (335)..(335): n is a, c, g, or t
  misc_feature (337)..(337): n is a, c, g, or t
  misc_feature (359)..(359): n is a, c, g, or t
  misc_feature (365)..(365): n is a, c, g, or t
  misc_feature (367)..(368): n is a, c, g, or t
  misc_feature (371)..(371): n is a, c, g, or t
  misc_feature (396)..(396): n is a, c, g, or t
  misc_feature (405)..(422): n is a, c, g, or t
  misc_feature (500)..(500): n is a, c, g, or t
  misc_feature (518)..(532): n is a, c, g, or t
  misc_feature (540)..(540): n is a, c, g, or t
  misc_feature (564)..(564): n is a, c, g, or t

SEQ ID NO: 1552 - DNA, 492 bp, Mus musculus
  misc_feature (28)..(28): n is a, c, g, or t
  misc_feature (37)..(37): n is a, c, g, or t
  misc_feature (45)..(45): n is a, c, g, or t
  misc_feature (48)..(49): n is a, c, g, or t
  misc_feature (52)..(53): n is a, c, g, or t
  misc_feature (57)..(57): n is a, c, g, or t
  misc_feature (59)..(59): n is a, c, g, or t
  misc_feature (137)..(138): n is a, c, g, or t
  misc_feature (168)..(168): n is a, c, g, or t
  misc_feature (293)..(293): n is a, c, g, or t
  misc_feature (296)..(296): n is a, c, g, or t
  misc_feature (298)..(299): n is a, c, g, or t
  misc_feature (314)..(314): n is a, c, g, or t
  misc_feature (317)..(317): n is a, c, g, or t
  misc_feature (331)..(331): n is a, c, g, or t
  misc_feature (334)..(334): n is a, c, g, or t
  misc_feature (380)..(380): n is a, c, g, or t
  misc_feature (414)..(414): n is a, c, g, or t
  misc_feature (435)..(435): n is a, c, g, or t
  misc_feature (437)..(437): n is a, c, g, or t
ccactgaaagccaggcttatagtattcnatctttaantgtggganctnntannagtntngattgttaccttagtgtgagttctttacctgcctccttatactaacaggcaagtaggtatataatttgataaagtccnnaaatattattaacagaagatgtaagaattnctgcatggtctaagtctttgtgtatcttacttgtaaattatttgccctgaagttttagaaaacagtttctgaattttaaacttgctggattcatgcagccagcattgcaggttatcagagatcanagntnntaataataatacatnttntaaattgtaagcanaangttatttttatactatatactgtctaattgttcatcctaatggttnttgttttcatctagtcatggagattcagtaagtnccttggaacaatattgaattntnttagctcgtgtgtgttactttaaaatttgaattcaactggggttagaagactatc

SEQ ID NO: 1553 - DNA, 492 bp, Mus musculus; identical to SEQ ID NO: 1552
  misc_feature (28)..(28): n is a, c, g, or t
  misc_feature (37)..(37): n is a, c, g, or t
  misc_feature (45)..(45): n is a, c, g, or t
  misc_feature (48)..(49): n is a, c, g, or t
  misc_feature (52)..(53): n is a, c, g, or t
  misc_feature (57)..(57): n is a, c, g, or t
  misc_feature (59)..(59): n is a, c, g, or t
  misc_feature (137)..(138): n is a, c, g, or t
  misc_feature (168)..(168): n is a, c, g, or t
  misc_feature (293)..(293): n is a, c, g, or t
  misc_feature (296)..(296): n is a, c, g, or t
  misc_feature (298)..(299): n is a, c, g, or t
  misc_feature (314)..(314): n is a, c, g, or t
  misc_feature (317)..(317): n is a, c, g, or t
  misc_feature (331)..(331): n is a, c, g, or t
  misc_feature (334)..(334): n is a, c, g, or t
  misc_feature (380)..(380): n is a, c, g, or t
  misc_feature (414)..(414): n is a, c, g, or t
  misc_feature (435)..(435): n is a, c, g, or t
  misc_feature (437)..(437): n is a, c, g, or t

SEQ ID NO: 1554 - DNA, 278 bp, Mus musculus
  misc_feature (117)..(117): n is a, c, g, or t
  misc_feature (154)..(154): n is a, c, g, or t
  misc_feature (168)..(169): n is a, c, g, or t
  misc_feature (207)..(225): n is a, c, g, or t
ctgactgtgtcctgccaaggcgggctacccaaggaagcctgtatggacatttcatcaccagggtgccagccccctgcccagaggctgtgccagtctgttccaccgagcccagactgncagctggttctacaccaagtgctgaaaggtggctcanggacatattgcctnnatgtgtctttggctgacgccaacagcctggcagtggcnnnnnnnnnnnnnnnnnnncctggtcaagacggtggccttgggcaggctcccttgcttgtaggtatcttgct

SEQ ID NO: 1555 - DNA, 278 bp, Mus musculus; identical to SEQ ID NO: 1554
  misc_feature (117)..(117): n is a, c, g, or t
  misc_feature (154)..(154): n is a, c, g, or t
  misc_feature (168)..(169): n is a, c, g, or t
  misc_feature (207)..(225): n is a, c, g, or t

SEQ ID NO: 1556 - DNA, 240 bp, Mus musculus
  misc_feature (169)..(218): n is a, c, g, or t
acacctgttgtggaccccatcgggtacgggtcgttatggtacacgagcgtggggttcggcggcctggcgcagctccggagcggcgagagggtctacgttaacatcagtcaccccgacatggtggactacaggagagggaagaccttcttcggggcggtgatggtggggnnnnnnnnnnnnnnnnnnnnnnnnnnnnnnnnnnnnnnnnnnnnnnnnnngtgaatcgtgatgtccgggacc

SEQ ID NO: 1557 - DNA, 244 bp, Mus musculus
  misc_feature (169)..(218): n is a, c, g, or t
acacctgttgtggaccccatcgggtacgggtcgttatggtacacgagcgtggggttcggcggcctggcgcagctccggagcggcgagagggtctacgttaacatcagtcaccccgacatggtggactacaggagagggaagaccttcttcggggcggtgatggtggggnnnnnnnnnnnnnnnnnnnnnnnnnnnnnnnnnnnnnnnnnnnnnnnnnngtgaatcgtgatgtccgggaccccga

SEQ ID NO: 1558 - DNA, 529 bp, Mus musculus
  misc_feature (363)..(396): n is a, c, g, or t
aatacccagacacaatggaaaatgggactctcttcccagtgacccctgctaaaactgaggtctttggagaaactgaagtgactcttgctactgactccaacgttaatgttgatggctccttaccaggagatcgagactcatccaaggactccagggggagttcccgcactgtgactcatggatccgaattagctggacactcaagtgcgaaccaggacagtggagtgaccacaacttctggtcctatgaggagacctcagattccagaatggctcatcatcttggcatctctcctggcactggctctgattcttgccgtctgcatcgcggtcaatagtaggagaaggtgtgggcagaagaaannnnnnnnnnnnnnnnnnnnnnnnnnnnnnnnnnaagacaggaaacccagtgagctcaacggggaggccagcaagtctcaggaaatggtgcatttggtgaacaaggaaccatcagagaccccagaccagtgtatgacagctgacgagacccggaatctgcagagtgt

SEQ ID NO: 1559 - DNA, 529 bp, Mus musculus; identical to SEQ ID NO: 1558
  misc_feature (363)..(396): n is a, c, g, or t

SEQ ID NO: 1560 - DNA, 408 bp, Mus musculus
  misc_feature (65)..(65): n is a, c, g, or t
  misc_feature (200)..(200): n is a, c, g, or t
  misc_feature (207)..(207): n is a, c, g, or t
  misc_feature (214)..(230): n is a, c, g, or t
  misc_feature (233)..(233): n is a, c, g, or t
  misc_feature (252)..(252): n is a, c, g, or t
  misc_feature (259)..(259): n is a, c, g, or t
  misc_feature (273)..(273): n is a, c, g, or t
  misc_feature (277)..(277): n is a, c, g, or t
  misc_feature (282)..(282): n is a, c, g, or t
  misc_feature (296)..(296): n is a, c, g, or t
  misc_feature (298)..(298): n is a, c, g, or t
  misc_feature (300)..(300): n is a, c, g, or t
  misc_feature (309)..(309): n is a, c, g, or t
  misc_feature (313)..(313): n is a, c, g, or t
  misc_feature (318)..(318): n is a, c, g, or t
  misc_feature (323)..(323): n is a, c, g, or t
  misc_feature (325)..(325): n is a, c, g, or t
  misc_feature (328)..(328): n is a, c, g, or t
  misc_feature (330)..(330): n is a, c, g, or t
  misc_feature (352)..(352): n is a, c, g, or t
  misc_feature (360)..(361): n is a, c, g, or t
  misc_feature (365)..(367): n is a, c, g, or t
  misc_feature (369)..(383): n is a, c, g, or t
ggtcaaggacatacccctgctgttagaggggaggctggagtatccctgggctctggggctgaagncctccctctgtaccagccaatgatgagggctggccttgagccccccacccccaagagagggcagatggccagaaagccaggcttggcccggcagtctgtcgcctcaaattgtagctctggcgcctgtgctgtganccttgtngcccttnnnnnnnnnnnnnnnnngtnctgagaagccacagtgatngttggcngggtcggggaatancatnatgtncccaagagattggntnancattcccangatngaggncctgngngtnangttccctttgctacactttgtnaccttgcnncaannnannnnnnnnnnnnnnnccctggtgtcttgagaaccctgtct

SEQ ID NO: 1561 - DNA, 408 bp, Mus musculus; identical to SEQ ID NO: 1560
  misc_feature (65)..(65): n is a, c, g, or t
  misc_feature (200)..(200): n is a, c, g, or t
  misc_feature (207)..(207): n is a, c, g, or t
  misc_feature (214)..(230): n is a, c, g, or t
  misc_feature (233)..(233): n is a, c, g, or t
  misc_feature (252)..(252): n is a, c, g, or t
  misc_feature (259)..(259): n is a, c, g, or t
  misc_feature (273)..(273): n is a, c, g, or t
  misc_feature (277)..(277): n is a, c, g, or t
  misc_feature (282)..(282): n is a, c, g, or t
  misc_feature (296)..(296): n is a, c, g, or t
  misc_feature (298)..(298): n is a, c, g, or t
  misc_feature (300)..(300): n is a, c, g, or t
  misc_feature (309)..(309): n is a, c, g, or t
  misc_feature (313)..(313): n is a, c, g, or t
  misc_feature (318)..(318): n is a, c, g, or t
  misc_feature (323)..(323): n is a, c, g, or t
  misc_feature (325)..(325): n is a, c, g, or t
  misc_feature (328)..(328): n is a, c, g, or t
  misc_feature (330)..(330): n is a, c, g, or t
  misc_feature (352)..(352): n is a, c, g, or t
  misc_feature (360)..(361): n is a, c, g, or t
  misc_feature (365)..(367): n is a, c, g, or t
  misc_feature (369)..(383): n is a, c, g, or t

SEQ ID NO: 1562 - DNA, 96 bp, Mus musculus
caacagcaagcaagcggtcaggatcaataaagagcaggtgtcacaactgctgccagagaaatttgcagagcagctcattcgggtgtactgtaagaa

SEQ ID NO: 1563 - DNA, 96 bp, Mus musculus; identical to SEQ ID NO: 1562

SEQ ID NO: 1564 - DNA, 215 bp, Mus musculus
ccacctctttagtgccaatgttgtgtgttgcacttgagttctttaatgtgcatgtacgtggaagtgttcctgtctcaatagctccaagctgttaaagatatttttattcaaactacctatattccttgtgtaattaatgctgttgtagaggtgacttgataagacacaaattaacttgttcaacgtgtagtggctagtggctctgtgacgaaaac

SEQ ID NO: 1565 - DNA, 215 bp, Mus musculus; identical to SEQ ID NO: 1564

SEQ ID NO: 1566 - DNA, 367 bp, Mus musculus
  misc_feature (49)..(56): n is a, c, g, or t
  misc_feature (58)..(59): n is a, c, g, or t
  misc_feature (61)..(62): n is a, c, g, or t
  misc_feature (64)..(65): n is a, c, g, or t
  misc_feature (228)..(228): n is a, c, g, or t
  misc_feature (230)..(230): n is a, c, g, or t
  misc_feature (232)..(232): n is a, c, g, or t
  misc_feature (255)..(255): n is a, c, g, or t
tgccaagtcagcaatcctgtaagcagcaagaacgacacagtgtacttcnnnnnnnntnntnntnnagccagatcttctggagtatgttggactgcaacttggctagtggtcacaacactcatcattcacaggatcctgttaacctgacaagaactcttctcacccaagaaggcaacttggaagcacagagtcttgccttcatccctagcagtgttcctagccagcgancnanctctggctctattggacaaaggnaaatgtgttactgaacgtctgcgagagtttgcatgcatgctctatgaaacaagcacaggaccttgtacagtgctccaccactgacctgtgtgcccagtcctttacaaagatt

SEQ ID NO: 1567 - DNA, 367 bp, Mus musculus; identical to SEQ ID NO: 1566
  misc_feature (49)..(56): n is a, c, g, or t
  misc_feature (58)..(59): n is a, c, g, or t
  misc_feature (61)..(62): n is a, c, g, or t
  misc_feature (64)..(65): n is a, c, g, or t
  misc_feature (228)..(228): n is a, c, g, or t
  misc_feature (230)..(230): n is a, c, g, or t
  misc_feature (232)..(232): n is a, c, g, or t
  misc_feature (255)..(255): n is a, c, g, or t

SEQ ID NO: 1568 - DNA, 241 bp, Mus musculus
  misc_feature (129)..(145): n is a, c, g, or t
ccagcaagacctcagccatgagacttctcctcctgactttcctgggagtctgctgcctcaccccatgggttgtggaaggtgtggggactgaagtcctagaagagagtagctgtgtgaacttacaaaccnnnnnnnnnnnnnnnnnaaaaatcaagacctatatcatctgggagggggccatgagagctgtaatttttgtcaccaaacgaggactaaaaatttgtgctgatccagaagccaa

SEQ ID NO: 1569 - DNA, 241 bp, Mus musculus; identical to SEQ ID NO: 1568
  misc_feature (129)..(145): n is a, c, g, or t

SEQ ID NO: 1570 - DNA, 582 bp, Mus musculus
  misc_feature (135)..(135): n is a, c, g, or t
  misc_feature (160)..(160): n is a, c, g, or t
  misc_feature (165)..(166): n is a, c, g, or t
  misc_feature (169)..(169): n is a, c, g, or t
  misc_feature (171)..(171): n is a, c, g, or t
  misc_feature (465)..(539): n is a, c, g, or t
cccgggatcactggaccaaagtcaagtggccaaacatcgcctactcttcttcaaacaccggctacagtgcatgaccgccgagtgacgtctgatttgggccttcacactgtcaggctgggcctgcctccttgttcnttccaggattatccaccaccacctncatcnntgngnaccccactgatgaacaccctggcttcccgatcctctccaccaatctgattcctaacaggggcttgtcctggtgacacccttcctttctgtgagcgaccagaggcccgatggagccatatcctcttccccccacagccagtgccaagtcctcccacaaccccattcctatggggcaggaaatggggaggttcactttccaagtgccaaagagcccagaaggactctaagaccctcaagtggaaacactctcacctcccgaggtgggcagggaaactcccaatttgcaaccccagnnnnnnnnnnnnnnnnnnnnnnnnnnnnnnnnnnnnnnnnnnnnnnnnnnnnnnnnnnnnnnnnnnnnnnnnnnntgactgtagttctgtggggctggtgaacacacggtgaaagcca

SEQ ID NO: 1571 - DNA, 582 bp, Mus musculus; identical to SEQ ID NO: 1570
  misc_feature (135)..(135): n is a, c, g, or t
  misc_feature (160)..(160): n is a, c, g, or t
  misc_feature (165)..(166): n is a, c, g, or t
  misc_feature (169)..(169): n is a, c, g, or t
  misc_feature (171)..(171): n is a, c, g, or t
  misc_feature (465)..(539): n is a, c, g, or t

SEQ ID NO: 1572 - DNA, 377 bp, Mus musculus
  misc_feature (320)..(320): n is a, c, g, or t
  misc_feature (322)..(322): n is a, c, g, or t
  misc_feature (330)..(330): n is a, c, g, or t
accctgtgtttgtggtcctccactcttttacagacgccatctttgatgagtggctgaagagaaacaacccttccacagatgcctggcctcaggaactggcacccattggtcacaaccgaatgtataacatggtccccttcttcccaccggtgactaatgaggagctcttcctaaccgcagagcaacttggctacaattacgccgttgatctgtcagaggaagaagctccagtttggtccacaactctctcagtggtcattggaatcctgggagctttcgtcttgctcttggggttgctggcttttcttcaatacagaagncntcgcaaangctatgcgcccttaatggagacaggtctcagcagcaagagatacacg

SEQ ID NO: 1573 - DNA, 377 bp, Mus musculus; identical to SEQ ID NO: 1572
  misc_feature (320)..(320): n is a, c, g, or t
  misc_feature (322)..(322): n is a, c, g, or t
  misc_feature (330)..(330): n is a, c, g, or t

SEQ ID NO: 1574 - DNA, 515 bp, Mus musculus
  misc_feature (198)..(212): n is a, c, g, or t
  misc_feature (389)..(403): n is a, c, g, or t
gattcattgccacatagattatcagctgccaaaatggtatattatttagattcttctagtcaaaaacgagcaatagagctggcgacaacacttgatggatccctcaccaacagaaaccttcagacttgcatggaggtgttggaagccttgtgtgatggtagcctaggagactgtaaagaagctgccgaagcctacagnnnnnnnnnnnnnnngcttttcccttatgctttggctttcatgcctcctggatacgaagaggatatgaagatcacagtgaacggagatagttctgcagaaacggaagaactggccaatgaaatctgaacatcattaaacaagcaaatggaatgactttggaccatatctagtgtataatatttttgtcacgnnnnnnnnnnnnnnntcttacttacacagaatgagaggagtaaatgttcttgccttcaaatagtcttacgttttttatcctgctgaaaactatatataaaatatctaacattacaggatataggttc

SEQ ID NO: 1575 - DNA, 515 bp, Mus musculus; identical to SEQ ID NO: 1574
  misc_feature (198)..(212): n is a, c, g, or t
  misc_feature (389)..(403): n is a, c, g, or t

SEQ ID NO: 1576 - DNA, 341 bp, Mus musculus
  misc_feature (110)..(110): n is a, c, g, or t
gtgacatccatatctggcccaggtgagcacctccggaatgctctgtggcatactggccacacccctgatcaggtacgactgctgtggactgacccacggaatgtgggttngcgagacaagacatcctatagatggcggctgctccaccggccccaagttggctacattcgggtgaagctctatgagggtccccagctagtggcggattctggggtgattattgacacgtccatgcgaggggggcgtctcggcgtattctgcttctcccaagaaaacatcatttggtccaatctccagtaccgatgcaatgacacagtgcctgaggactttgagccattccg

SEQ ID NO: 1577 - DNA, 341 bp, Mus musculus; identical to SEQ ID NO: 1576
  misc_feature (110)..(110): n is a, c, g, or t

SEQ ID NO: 1578 - DNA, 529 bp, Mus musculus
  misc_feature (110)..(110): n is a, c, g, or t
  misc_feature (294)..(294): n is a, c, g, or t
  misc_feature (340)..(340): n is a, c, g, or t
  misc_feature (342)..(342): n is a, c, g, or t
  misc_feature (345)..(345): n is a, c, g, or t
  misc_feature (347)..(347): n is a, c, g, or t
  misc_feature (362)..(362): n is a, c, g, or t
  misc_feature (392)..(392): n is a, c, g, or t
  misc_feature (402)..(402): n is a, c, g, or t
  misc_feature (418)..(418): n is a, c, g, or t
ggacccgttatcttcatatcggaatagacatgaacagagctctaaggcgatgaaagtctgccagcatcctctctgtcctcgcacgtgccttctgcctggctccatttgcntttggcactgcgttcgatctagagtgtaggtgctcactgcttatttcagccctggctctgtggttttgtgtcctccagtggtgctgttcactgttggggtgcaggtggtgctgccctgactcagaggggcagctccctggctcctgagggtgagccttcttggctactacagaagtattgtgcntttgtttatggcaagaaccatcaggattggataaatgtgttatttntnttngntttccatggagccanactgttggtacatgtcccctgtgaacaganctacctttcnggagcacatcatactntcgtgagtcacggcacggtgtgtcctgtgagaagaggctttctaacgtgtgatttgccgtgtttctatgttgtgatttaagcgtgattgcctactagtcattcaaggtaac

SEQ ID NO: 1579 - DNA, 529 bp, Mus musculus; identical to SEQ ID NO: 1578
  misc_feature (110)..(110): n is a, c, g, or t
  misc_feature (294)..(294): n is a, c, g, or t
  misc_feature (340)..(340): n is a, c, g, or t
  misc_feature (342)..(342): n is a, c, g, or t
  misc_feature (345)..(345): n is a, c, g, or t
  misc_feature (347)..(347): n is a, c, g, or t
  misc_feature (362)..(362): n is a, c, g, or t
  misc_feature (392)..(392): n is a, c, g, or t
  misc_feature (402)..(402): n is a, c, g, or t
  misc_feature (418)..(418): n is a, c, g, or t

SEQ ID NO: 1580 - DNA, 304 bp, Mus musculus
  misc_feature (99)..(99): n is a, c, g, or t
  misc_feature (106)..(106): n is a, c, g, or t
  misc_feature (135)..(135): n is a, c, g, or t
  misc_feature (139)..(139): n is a, c, g, or t
  misc_feature (142)..(142): n is a, c, g, or t
  misc_feature (163)..(163): n is a, c, g, or t
  misc_feature (168)..(168): n is a, c, g, or t
  misc_feature (171)..(171): n is a, c, g, or t
  misc_feature (175)..(175): n is a, c, g, or t
  misc_feature (177)..(178): n is a, c, g, or t
  misc_feature (180)..(181): n is a, c, g, or t
  misc_feature (183)..(183): n is a, c, g, or t
  misc_feature (185)..(185): n is a, c, g, or t
  misc_feature (189)..(189): n is a, c, g, or t
  misc_feature (197)..(197): n is a, c, g, or t
  misc_feature (203)..(204): n is a, c, g, or t
  misc_feature (206)..(206): n is a, c, g, or t
  misc_feature (213)..(213): n is a, c, g, or t
  misc_feature (216)..(216): n is a, c, g, or t
cagggtagtctgtttctagacttgtgttggttgtgctaaattttcattagagctctaaaatctaatgttaaaattctacccaatcatctaatgtcttangcagcancttttagtgcggggttggacctacacttnaagnacnaatggataacactttccatgntttgnganatcntnncnnantnatcntttaaaanttttgnngncctttgnaanaacttcctctttgcttcatggtcatgaaaatgtcagagccagttgtaagaacaatgctatatgtcctgagggcattaactagtgtctt

SEQ ID NO: 1581 - DNA, 304 bp, Mus musculus; identical to SEQ ID NO: 1580
  misc_feature (99)..(99): n is a, c, g, or t
  misc_feature (106)..(106): n is a, c, g, or t
  misc_feature (135)..(135): n is a, c, g, or t
  misc_feature (139)..(139): n is a, c, g, or t
  misc_feature (142)..(142): n is a, c, g, or t
  misc_feature (163)..(163): n is a, c, g, or t
  misc_feature (168)..(168): n is a, c, g, or t
  misc_feature (171)..(171): n is a, c, g, or t
  misc_feature (175)..(175): n is a, c, g, or t
  misc_feature (177)..(178): n is a, c, g, or t
  misc_feature (180)..(181): n is a, c, g, or t
  misc_feature (183)..(183): n is a, c, g, or t
  misc_feature (185)..(185): n is a, c, g, or t
  misc_feature (189)..(189): n is a, c, g, or t
  misc_feature (197)..(197): n is a, c, g, or t
  misc_feature (203)..(204): n is a, c, g, or t
  misc_feature (206)..(206): n is a, c, g, or t
  misc_feature (213)..(213): n is a, c, g, or t
  misc_feature (216)..(216): n is a, c, g, or t

SEQ ID NO: 1582 - DNA, 194 bp, Mus musculus
gagagtctcctttccgacatatcttctggggctctggctctcacactctctcagctttagtggagaacttgaagcttcgtcaaaaaaatattactgcttttaatgaaaccctcttcagaaaccagttggccctggctacttggactattcagggagtcgcaaatgccctctctggtgacatttggaatattgac

SEQ ID NO: 1583 - DNA, 194 bp, Mus musculus; identical to SEQ ID NO: 1582

SEQ ID NO: 1584 - DNA, 309 bp, Mus musculus
  misc_feature (26)..(27): n is a, c, g, or t
  misc_feature (48)..(50): n is a, c, g, or t
  misc_feature (55)..(56): n is a, c, g, or t
  misc_feature (65)..(65): n is a, c, g, or t
  misc_feature (73)..(73): n is a, c, g, or t
gctggaaggccatccgtgtagatctnntcatgtgcccctatgatcgcnnngcctnngccctgctnggatggancggctccagacagtttgagagagacttgcggcgctatgccacacacgagaggaagatgatgctggacaaccacgccctgtatgacaggactaagagggtgtttcttgaagcagaaagtgaagaagagatctttgcccatctgggactggactacattgaaccatgggaaagaaatgcctaagacggagttgttgacatttttcttttcggtttagacaagctgtgctctgtgttag

SEQ ID NO: 1585 - DNA, 309 bp, Mus musculus; identical to SEQ ID NO: 1584
  misc_feature (26)..(27): n is a, c, g, or t
  misc_feature (48)..(50): n is a, c, g, or t
  misc_feature (55)..(56): n is a, c, g, or t
  misc_feature (65)..(65): n is a, c, g, or t
  misc_feature (73)..(73): n is a, c, g, or t

SEQ ID NO: 1586 - DNA, 341 bp, Mus musculus
  misc_feature (54)..(54): n is a, c, g, or t
  misc_feature (198)..(198): n is a, c, g, or t
tggaagtgacttttccgatttcctttgtttgctaatcacgtgtgcccacacggnaaaaaaacaaaaaacaaaaaaacgaagacttcccagagttccaagctctgtgggaagccccccccaggactgtgtcgctgccatataagatctgtcacctgaatccaaggagggaagaacctcagaggagcaagtacagatcanaagtgtttctccgcacagtattccaaggtcagggccactgaattgatccagagaggtgtgcacacatcaggaggcccctcaggtatggctctgcagccccaccgctgggcttggctccaacgctgcataaatcgcataaatcg

SEQ ID NO: 1587 - DNA, 341 bp, Mus musculus; identical to SEQ ID NO: 1586
  misc_feature (54)..(54): n is a, c, g, or t
  misc_feature (198)..(198): n is a, c, g, or t

SEQ ID NO: 1588 - DNA, 194 bp, Mus musculus
  misc_feature (116)..(134): n is a, c, g, or t
ccacagcctgtggagaccagggttggaagccaggtgcagggccaggcatctgcattgtgggatgttaatggcacttttgtcttgtagctattttgagatgtggtccagagcatttnnnnnnnnnnnnnnnnnnntggccaccaggactctggctactgttaaaatcctgatgtttctgtggaatcctcagtgtt

SEQ ID NO: 1589 - DNA, 194 bp, Mus musculus; identical to SEQ ID NO: 1588
  misc_feature (116)..(134): n is a, c, g, or t

SEQ ID NO: 1590 - DNA, 115 bp, Mus musculus
ccaaagataaccacagccacagcctgtggagaccagggttggaagccaggtgcagggccaggcatctgcattgtgggatgttaatggcacttttgtcttgtagctattttgagat

SEQ ID NO: 1591 - DNA, 115 bp, Mus musculus; identical to SEQ ID NO: 1590

SEQ ID NO: 1592 - DNA, 475 bp, Mus musculus
  misc_feature (147)..(192): n is a, c, g, or t
  misc_feature (194)..(194): n is a, c, g, or t
  misc_feature (201)..(201): n is a, c, g, or t
  misc_feature (204)..(204): n is a, c, g, or t
  misc_feature (281)..(281): n is a, c, g, or t
  misc_feature (288)..(302): n is a, c, g, or t
  misc_feature (363)..(363): n is a, c, g, or t
  misc_feature (365)..(365): n is a, c, g, or t
tcacatgctgtgtggttcccatagtgttctctttcaccctgatcttttccttctgttcccctgtaactttttaatcaccttagagtcatgatctttggggttggttgctttgggagattttattatgacgatgacttcagtttcttnnnnnnnnnnnnnnnnnnnnnnnnnnnnnnnnnnnnnnnnnnnnnnanactggcntanaaaggatattgtccatctatttagaaaactattaagggcaacctacctgttgtgtcttttccgatctcatttagctntgccagnnnnnnnnnnnnnnnctggtgtggtcttgggccgctcctgactatcctcacataccctcccataacaattcagttntnttagggcttgaaacttcacatttaaatctgtcaaggcgctctgtttagccctcacactttcttggccttgttactttcaatccctgattctgcttctgtaaagtggtatc

SEQ ID NO: 1593 - DNA, 475 bp, Mus musculus; identical to SEQ ID NO: 1592
  misc_feature (147)..(192): n is a, c, g, or t
  misc_feature (194)..(194): n is a, c, g, or t
  misc_feature (201)..(201): n is a, c, g, or t
  misc_feature (204)..(204): n is a, c, g, or t
  misc_feature (281)..(281): n is a, c, g, or t
  misc_feature (288)..(302): n is a, c, g, or t
  misc_feature (363)..(363): n is a, c, g, or t
  misc_feature (365)..(365): n is a, c, g, or t

SEQ ID NO: 1594 - DNA, 538 bp, Mus musculus
  misc_feature (153)..(153): n is a, c, g, or t
  misc_feature (196)..(196): n is a, c, g, or t
  misc_feature (288)..(288): n is a, c, g, or t
  misc_feature (291)..(291): n is a, c, g, or t
  misc_feature (311)..(312): n is a, c, g, or t
  misc_feature (325)..(326): n is a, c, g, or t
  misc_feature (334)..(334): n is a, c, g, or t
  misc_feature (341)..(341): n is a, c, g, or t
  misc_feature (406)..(406): n is a, c, g, or t
  misc_feature (422)..(474): n is a, c, g, or t
tcaggaaacgcaaaggcggccggcagggtttggttttggaaggtttgcgtgctcttcacagtcgggttacaggcgagttccctgtggcgtttcctactcctaatgagagttccttccggactcttacgtgtctcctggcctggccccaggaangaaatgatgcagcttgctccttcctcatctctcaggctgtgcnttaattcagaacaccaaaagagaggaacgtcggcagaggctcctgacggggccgaagaattgtgagaacagaacagaaactcagggtttctnctngggtggagacccacgtggcnnccctggtggcagnntctgaggnttctctntcaagtggcggtaaaggctcaggctggtgttcttcctctatctccactcctgtcaggcccccaantcctcagtattttagnnnnnnnnnnnnnnnnnnnnnnnnnnnnnnnnnnnnnnnnnnnnnnnnnnnnnataatcactagccagatttcgaaattactttttagccgaggttatgataacatctactgtatcc

SEQ ID NO: 1595 - DNA, 538 bp, Mus musculus; identical to SEQ ID NO: 1594
  misc_feature (153)..(153): n is a, c, g, or t
  misc_feature (196)..(196): n is a, c, g, or t
  misc_feature (288)..(288): n is a, c, g, or t
  misc_feature (291)..(291): n is a, c, g, or t
  misc_feature (311)..(312): n is a, c, g, or t
  misc_feature (325)..(326): n is a, c, g, or t
  misc_feature (334)..(334): n is a, c, g, or t
  misc_feature (341)..(341): n is a, c, g, or t
  misc_feature (406)..(406): n is a, c, g, or t
  misc_feature (422)..(474): n is a, c, g, or t

SEQ ID NO: 1596 - DNA, 343 bp, Mus musculus
  misc_feature (128)..(142): n is a, c, g, or t
  misc_feature (167)..(167): n is a, c, g, or t
  misc_feature (203)..(203): n is a, c, g, or t
  misc_feature (218)..(218): n is a, c, g, or t
ctcagtgggccaatatcatactaaagtatgtaatatgacataaacatatctatatctccatgcttgagtgtatagaatgaatgtcttaagagccatttgtgatgttttatggtgttgaccctggctcnnnnnnnnnnnnnnnaaacaaagacagagttttaaccatnttccttttatgtacttgttcagctttatctgtgctntcttcatagatgttntctcatgtttcaaacttataaattactgttgtaattatgaagataataaactttaataagtaaaaatgtgtactatatcattttgcattgaaactttgtgctgttcttgatcgtgtgcatatggt

SEQ ID NO: 1597 - DNA, 343 bp, Mus musculus; identical to SEQ ID NO: 1596
  misc_feature (128)..(142): n is a, c, g, or t
  misc_feature (167)..(167): n is a, c, g, or t
  misc_feature (203)..(203): n is a, c, g, or t
  misc_feature (218)..(218): n is a, c, g, or t

SEQ ID NO: 1598 - DNA, 362 bp, Mus musculus
  misc_feature (45)..(59): n is a, c, g, or t
agcggcctggacttgtccgttctaaggaccagtttgagtttgcgnnnnnnnnnnnnnnngaggaggtgaatgctatcctcaaggccctgccccagtgagcccccctgggcgcctcagtgggcatcctggcctcggctccttctgcctgtgtgagcatctgtgcacccactcttcagcccctacccatctgccaccttggtctgacttggccatgggagcctttcccaacccagtgtggaagggagtcgggagggaaggaaggggtaggctcgccctgctttatccatgctagaaccatggtatcccatgggaagcagacagcaggcaaggagaggcgtggacaccggccacaggtgtgcccg

SEQ ID NO: 1599 - DNA, 362 bp, Mus musculus; identical to SEQ ID NO: 1598
  misc_feature (45)..(59): n is a, c, g, or t

SEQ ID NO: 1600 - DNA, 399 bp, Mus musculus
  misc_feature (41)..(41): n is a, c, g, or t
ctcatgggagctggtccttatttatttaacacccccctcancccccaactcctcctgagttccactgagttcctaagcagtcacaacaatgacttgaccgcaagacatttgctgaactcggcacattcgggaccaatatattgtgggtacatcaagtccctctgacaaaacagggcagaagagaaaggactctgtttgaggcagtttcttcgcttgcctgtttttttttttctagaaacttcatgcttgacacacccaccagtattaaccattcccgatgacatgcgcgtatgagagtttttacctttatttatttttgtgtaggtcggtggtctgccttcacaaatgtcattgtctactcatagaagaaccaaatacctcaattttgtgtttgcgtac

SEQ ID NO: 1601 - DNA, 399 bp, Mus musculus; identical to SEQ ID NO: 1600
  misc_feature (41)..(41): n is a, c, g, or t

SEQ ID NO: 1602 - DNA, 423 bp, Mus musculus
tctgctccctgaagcggggaaatggtgacccccccccccaccagtctgagaagatgggcgggacagcgggctgggggctggggcagcagtcatctgcagatatcaccccctagagtaccaatgtttgtggtattaggtttgccttgttttgttttggtcttttgttgttttattaaagaaaagctaaagaccgtgtgagccctgctggtgggctctccatggatgtagcatatggaagagagtttttatattgcatttttatggattattttataatgtgggactccgtctgggaaggaagatgagggtgtctaaaaccttcccatctccagagctccagctgagcggctgcccggaacaggatgtatgttgggacatggaaagaccgtggcaccctgcgccttcctgagaggcatgtcgtcg

SEQ ID NO: 1603 - DNA, 423 bp, Mus musculus; identical to SEQ ID NO: 1602

SEQ ID NO: 1604 - DNA, 469 bp, Mus musculus
  misc_feature (31)..(121): n is a, c, g, or t
  misc_feature (160)..(179): n is a, c, g, or t
  misc_feature (222)..(222): n is a, c, g, or t
  misc_feature (224)..(225): n is a, c, g, or t
  misc_feature (227)..(236): n is a, c, g, or t
  misc_feature (238)..(238): n is a, c, g, or t
  misc_feature (242)..(243): n is a, c, g, or t
aacagcagacacaggggacccactctgtgtnnnnnnnnnnnnnnnnnnnnnnnnnnnnnnnnnnnnnnnnnnnnnnnnnnnnnnnnnnnnnnnnnnnnnnnnnnnnnnnnnnnnnnnnnnnctggggaaatgaagagagggtgtcttttgctttgggttnnnnnnnnnnnnnnnnnnnnctggcacacgtgggcagtcagccacacttcagacctgacagcngnngnnnnnnnnnncngtcnntttagttaggcttggtacatctgttatcacagatgctcagtggaccaagactgtctcgctactctctccccactctctgaaattttaattttgtttagaggtgcatggttcaaatatcagcattctaaaaaaaaaaattgatttaagaaaatgctgtatgatgttagaagacattgtaattatcatcccgtgtctttgctgtactcgtgctgaagtgttttcacag

SEQ ID NO: 1605 - DNA, 469 bp, Mus musculus; identical to SEQ ID NO: 1604
  misc_feature (31)..(121): n is a, c, g, or t
  misc_feature (160)..(179): n is a, c, g, or t
  misc_feature (222)..(222): n is a, c, g, or t
  misc_feature (224)..(225): n is a, c, g, or t
  misc_feature (227)..(236): n is a, c, g, or t
  misc_feature (238)..(238): n is a, c, g, or t
  misc_feature (242)..(243): n is a, c, g, or t

SEQ ID NO: 1606 - DNA, 297 bp, Mus musculus
  misc_feature (154)..(154): n is a, c, g, or t
  misc_feature (169)..(169): n is a, c, g, or t
gtcccaaagtacacagagctaagtaatcaattgctacacttattgcacagctagacacggatttcaagtgtatcctaaagctttgaaccaagcttagcttctcaaaggcctagcagagctttggcaccccaagatcctttctgtaggctatttnctcttgcccagcagnggatggagcgtccttgctaaaaagggttccatctcctttaaggacgttttatttttgatccagagtccttgtttccttgacttgctccaccagccctgcaccagctttccaaatgcactctgcttgtg

SEQ ID NO: 1607 - DNA, 297 bp, Mus musculus; identical to SEQ ID NO: 1606
  misc_feature (154)..(154): n is a, c, g, or t
  misc_feature (169)..(169): n is a, c, g, or t

SEQ ID NO: 1608 - DNA, 245 bp, Mus musculus
  misc_feature (73)..(100): n is a, c, g, or t
  misc_feature (103)..(121): n is a, c, g, or t
tcgaggagtacctgcgcgcgctcgacgtcaacgtggccttacgcaaaatcgccaacttgctgaagccagacannnnnnnnnnnnnnnnnnnnnnnnnnnngannnnnnnnnnnnnnnnnnnttttcggaactatatcatggacttccaagttgggaaggagtttgaggaagatctgacaggcatagacgaccgcaagtgcatgaccactgtgagctgggatggtgacaaactccagtgtgtgcag

SEQ ID NO: 1609 - DNA, 245 bp, Mus musculus; identical to SEQ ID NO: 1608
  misc_feature (73)..(100): n is a, c, g, or t
  misc_feature (103)..(121): n is a, c, g, or t

SEQ ID NO: 1610 - DNA, 387 bp, Mus musculus
  misc_feature (55)..(55): n is a, c, g, or t
  misc_feature (62)..(63): n is a, c, g, or t
  misc_feature (139)..(142): n is a, c, g, or t
  misc_feature (144)..(144): n is a, c, g, or t
  misc_feature (146)..(149): n is a, c, g, or t
  misc_feature (193)..(213): n is a, c, g, or t
  misc_feature (217)..(263): n is a, c, g, or t
gtgaaggtcaacaccaaccgctggcttcgagtcagggctcacagggagcacaggnaaggttnncccttcaggtgggcaatgaagcccctgtgactggctcttccccgctgggtgccacacaattggacacagatggagnnnnangnnnnggaggaggaggaagtaaaggtgttgaaagtcagcaggaccaagnnnnnnnnnnnnnnnnnnnnngatnnnnnnnnnnnnnnnnnnnnnnnnnnnnnnnnnnnnnnnnnnnnnnnccacccacacctcagtgaccatcgttttcatttgcttcttccctcagctagcttccagcactgaaaggtgaattctaaagatcttatctctatacattagtattgttccctgtggatgagtcta

SEQ ID NO: 1611 - DNA, 387 bp, Mus musculus; identical to SEQ ID NO: 1610
  misc_feature (55)..(55): n is a, c, g, or t
  misc_feature (62)..(63): n is a, c, g, or t
  misc_feature (139)..(142): n is a, c, g, or t
  misc_feature (144)..(144): n is a, c, g, or t
  misc_feature (146)..(149): n is a, c, g, or t
  misc_feature (193)..(213): n is a, c, g, or t
  misc_feature (217)..(263): n is a, c, g, or t

SEQ ID NO: 1612 - DNA, 496 bp, Mus musculus
  misc_feature (106)..(106): n is a, c, g, or t
  misc_feature (263)..(263): n is a, c, g, or t
  misc_feature (267)..(283): n is a, c, g, or t
  misc_feature (285)..(285): n is a, c, g, or t
  misc_feature (287)..(287): n is a, c, g, or t
  misc_feature (289)..(289): n is a, c, g, or t
  misc_feature (295)..(295): n is a, c, g, or t
  misc_feature (331)..(331): n is a, c, g, or t
  misc_feature (334)..(334): n is a, c, g, or t
  misc_feature (345)..(345): n is a, c, g, or t
  misc_feature (385)..(385): n is a, c, g, or t
  misc_feature (392)..(392): n is a, c, g, or t
  misc_feature (394)..(394): n is a, c, g, or t
  misc_feature (405)..(406): n is a, c, g, or t
  misc_feature (408)..(408): n is a, c, g, or t
  misc_feature (450)..(450): n is a, c, g, or t
  misc_feature (452)..(452): n is a, c, g, or t
cccctgctgtcactggggtcactttcctgtctggagggcagagtgaggaagaggcatccatcaacctcaatgctatcaacaagtgccccctgctgaagccatgggnccttgactttctcctatggtcgagccctgcaggcctctgctctaaaggcctggggtgggaagaaggagaacctgaaggcagcccaggaggagtacatcaagcgcgccctggccaacagcctcgcttgtcaaggaaagtataccccaagtggccagtntggnnnnnnnnnnnnnnnnntntntnttcatntctaaccatgcctactaaccagagctgaactaaggntgntccatcaacantccaggcccctgcctacccacttgctattgaagaggggtnttcaggntntttcccatcanntnttgctgctgccctcgtgtgcggtgttgtctgtgaatgctaantntgccatcccttccagcccactgccaataaacaactatttaaggg

SEQ ID NO: 1613 - DNA, 496 bp, Mus musculus; identical to SEQ ID NO: 1612
  misc_feature (106)..(106): n is a, c, g, or t
  misc_feature (263)..(263): n is a, c, g, or t
  misc_feature (267)..(283): n is a, c, g, or t
  misc_feature (285)..(285): n is a, c, g, or t
  misc_feature (287)..(287): n is a, c, g, or t
  misc_feature (289)..(289): n is a, c, g, or t
  misc_feature (295)..(295): n is a, c, g, or t
  misc_feature (331)..(331): n is a, c, g, or t
  misc_feature (334)..(334): n is a, c, g, or t
  misc_feature (345)..(345): n is a, c, g, or t
  misc_feature (385)..(385): n is a, c, g, or t
  misc_feature (392)..(392): n is a, c, g, or t
  misc_feature (394)..(394): n is a, c, g, or t
  misc_feature (405)..(406): n is a, c, g, or t
  misc_feature (408)..(408): n is a, c, g, or t
  misc_feature (450)..(450): n is a, c, g, or t
  misc_feature (452)..(452): n is a, c, g, or t

SEQ ID NO: 1614 - DNA, 376 bp, Mus musculus
  misc_feature (143)..(143): n is a, c, g, or t
  misc_feature (147)..(163): n is a, c, g, or t
  misc_feature (165)..(165): n is a, c, g, or t
  misc_feature (167)..(167): n is a, c, g, or t
  misc_feature (169)..(169): n is a, c, g, or t
  misc_feature (175)..(175): n is a, c, g, or t
  misc_feature (211)..(211): n is a, c, g, or t
  misc_feature (214)..(214): n is a, c, g, or t
  misc_feature (225)..(225): n is a, c, g, or t
  misc_feature (265)..(265): n is a, c, g, or t
  misc_feature (272)..(272): n is a, c, g, or t
  misc_feature (274)..(274): n is a, c, g, or t
  misc_feature (285)..(286): n is a, c, g, or t
  misc_feature (288)..(288): n is a, c, g, or t
  misc_feature (330)..(330): n is a, c, g, or t
  misc_feature (332)..(332): n is a, c, g, or t
tatggtcgagccctgcaggcctctgctctaaaggcctggggtgggaagaaggagaacctgaaggcagcccaggaggagtacatcaagcgcgccctggccaacagcctcgcttgtcaaggaaagtataccccaagtggccagtntggnnnnnnnnnnnnnnnnntntntnttcatntctaaccatgcctactaaccagagctgaactaaggntgntccatcaacantccaggcccctgcctacccacttgctattgaagaggggtnttcaggntntttcccatcanntnttgctgctgccctcgtgtgcggtgttgtctgtgaatgctaantntgccatcccttccagcccactgccaataaacaactatttaaggg

SEQ ID NO: 1615 - DNA, 349 bp, Mus musculus
  misc_feature (204)..(219): n is a, c, g, or t
  misc_feature (249)..(264): n is a, c, g, or t
aaccactgtctcttggtttgtcaactttcagatctgaaaccaagtatctttttttatgtaattatttatttgttcttaattggaaaataggatgttcaaaattaaaggtgtgttttaaaaagaatttgcccccaagtctcactatcaacagataagggtgtattcttgtatatcctgtatagatataatcatgcatatactccnnnnnnnnnnnnnnnntatgggttcattttatcaacagtattcctnnnnnnnnnnnnnnnnatgcctatattgcatttcctagtgtgaacaaactgtgtgtaacatagtcattccctcggtgggattcaagtgcattctctcagtg

SEQ ID NO: 1616 - DNA, 444 bp, Mus musculus
  misc_feature (82)..(82): n is a, c, g, or t
  misc_feature (90)..(90): n is a, c, g, or t
  misc_feature (92)..(92): n is a, c, g, or t
  misc_feature (128)..(128): n is a, c, g, or t
  misc_feature (133)..(133): n is a, c, g, or t
  misc_feature (136)..(136): n is a, c, g, or t
  misc_feature (138)..(138): n is a, c, g, or t
  misc_feature (169)..(176): n is a, c, g, or t
  misc_feature (186)..(186): n is a, c, g, or t
  misc_feature (188)..(188): n is a, c, g, or t
  misc_feature (190)..(190): n is a, c, g, or t
  misc_feature (255)..(255): n is a, c, g, or t
  misc_feature (278)..(278): n is a, c, g, or t
  misc_feature (281)..(281): n is a, c, g, or t
  misc_feature (326)..(326): n is a, c, g, or t
  misc_feature (333)..(337): n is a, c, g, or t
  misc_feature (381)..(381): n is a, c, g, or t
  misc_feature (383)..(383): n is a, c, g, or t
tcctttgcggtaaagaacttagtctgttctccccctactccagcctgcctgctgtgcttgcctgatgcttagaatcactttncccctggntnttcctgaggagacctaagacacacaccaaggatttntagtntcntnttgggtgttagattcagggcacaccagacannnnnnnncagatccctntntntggggaatccaaggcagagctgaggagacaggagaaagcagaagctgtcaagatgacaaagggtntatggtggaagatgtggccttcntcntccctgaggacttaataaattggattgaaataccaaccccaaatntggatannnnnttaaggatcatagggggaggtagctgcacaaagaagcttatatntntggaaaacaaactggagttttaacaaaataattaaagaaagtcacctactggttttatgaa

SEQ ID NO: 1617 - DNA, 444 bp, Mus musculus; identical to SEQ ID NO: 1616
  misc_feature (82)..(82): n is a, c, g, or t
  misc_feature (90)..(90): n is a, c, g, or t
  misc_feature (92)..(92): n is a, c, g, or t
  misc_feature (128)..(128): n is a, c, g, or t
  misc_feature (133)..(133): n is a, c, g, or t
  misc_feature (136)..(136): n is a, c, g, or t
  misc_feature (138)..(138): n is a, c, g, or t
  misc_feature (169)..(176): n is a, c, g, or t
  misc_feature (186)..(186): n is a, c, g, or t
  misc_feature (188)..(188): n is a, c, g, or t
  misc_feature (190)..(190): n is a, c, g, or t
  misc_feature (255)..(255): n is a, c, g, or t
  misc_feature (278)..(278): n is a, c, g, or t
  misc_feature (281)..(281): n is a, c, g, or t
  misc_feature (326)..(326): n is a, c, g, or t
  misc_feature (333)..(337): n is a, c, g, or t
  misc_feature (381)..(381): n is a, c, g, or t
  misc_feature (383)..(383): n is a, c, g, or t

SEQ ID NO: 1618 - DNA, 266 bp, Mus musculus
  misc_feature (91)..(91): n is a, c, g, or t
agacactctgcctggctctgcacagcagcggctcagcatcagcatccagctgcttgctgtgtgttagttgtctcacagctgagggctctgnctcggctacttcaggctttccggttaggaagataatttggtcacttgtgtctgtggccactcttagaattttctcttttgagggaacctgtgactggttggcttttgcattctatggagggagatggggttaaagactgtggcaacacacaccctccagaagagctgggaccaga

SEQ ID NO: 1619 - DNA, 266 bp, Mus musculus; identical to SEQ ID NO: 1618
  misc_feature (91)..(91): n is a, c, g, or t

SEQ ID NO: 1620 - DNA, 40 bp, Mus musculus
tccgtgttatacaccatactatgtggctccggaagtcctg

SEQ ID NO: 1621 - DNA, 40 bp, Mus musculus; identical to SEQ ID NO: 1620

SEQ ID NO: 1622 - DNA, 454 bp, Mus musculus
  misc_feature (311)..(311): n is a, c, g, or t
  misc_feature (313)..(313): n is a, c, g, or t
  misc_feature (329)..(329): n is a, c, g, or t
  misc_feature (333)..(333): n is a, c, g, or t
  misc_feature (335)..(335): n is a, c, g, or t
  misc_feature (339)..(339): n is a, c, g, or t
  misc_feature (341)..(341): n is a, c, g, or t
  misc_feature (350)..(350): n is a, c, g, or t
  misc_feature (380)..(380): n is a, c, g, or t
tcaccttgggctgcacctaagctgccccttcgactgcagaggcggctcagattgttcaaagcccccacccgggatcaggaccccgagattcctctaaaagctcggaaggtacacttcgctgagaaagtcacagtccatttccttgctgtctgggcaggaccagcccaagctgcccgtcgaggtccctgggagcagtttgcacgagatcgaagccgctttgctcgacgcattgcccaggcagaggagaagctgggtccctaccttacccctgattccagggccagagcatgggcacgccttagaaacccatntnttccacagtccgagcntcgntnttcntntgaggccantcccttgacccaagatgtgaccacaccctntccccttcccagtgaaaccccttcgcccagcctgtacttgggagggaggcggggctaagcctgagtagtttcct

SEQ ID NO: 1623 - DNA, 454 bp, Mus musculus; identical to SEQ ID NO: 1622
  misc_feature (311)..(311): n is a, c, g, or t
  misc_feature (313)..(313): n is a, c, g, or t
  misc_feature (329)..(329): n is a, c, g, or t
  misc_feature (333)..(333): n is a, c, g, or t
  misc_feature (335)..(335): n is a, c, g, or t
  misc_feature (339)..(339): n is a, c, g, or t
  misc_feature (341)..(341): n is a, c, g, or t
  misc_feature (350)..(350): n is a, c, g, or t
  misc_feature (380)..(380): n is a, c, g, or t

SEQ ID NO: 1624 - DNA, 367 bp, Mus musculus
  misc_feature (26)..(47): n is a, c, g, or t
  misc_feature (197)..(197): n is a, c, g, or t
  misc_feature (199)..(199): n is a, c, g, or t
  misc_feature (212)..(212): n is a, c, g, or t
  misc_feature (226)..(226): n is a, c, g, or t
  misc_feature (287)..(330): n is a, c, g, or t
ggtttgttatcgtaacctgtagtgcnnnnnnnnnnnnnnnnnnnnnngtgcaggacgaaatgctgaccctgaagttgcttctcattcacaaatagtaaaaagttgtttctccagtcttttgggaacacaggacttaaaagtcacatcatgtgtaggaattacatgcagcattgcccgggcgaggcaaaaagcgtttntntggcttgtggcgntgcccttgttaccntcccctgggattttcagaggtacacggttagaatgctacaatgttaccactgtgccttccnnnnnnnnnnnnnnnnnnnnnnnnnnnnnnnnnnnnnnnnnnnnatttaacaaaaaaaacgattcaagtgttacctacctg

SEQ ID NO: 1625 - DNA, 367 bp, Mus musculus; identical to SEQ ID NO: 1624
  misc_feature (26)..(47): n is a, c, g, or t
  misc_feature (197)..(197): n is a, c, g, or t
  misc_feature (199)..(199): n is a, c, g, or t
  misc_feature (212)..(212): n is a, c, g, or t
  misc_feature (226)..(226): n is a, c, g, or t
  misc_feature (287)..(330): n is a, c, g, or t

SEQ ID NO: 1626 - DNA, 332 bp, Mus musculus
cagtcagcagaaagagcctgttgccacagcaccggagcaggaaaacttcgtcaagcattaaccaactgtgatgacatcttaatcaagcagaaccagaccctggctgagctgcagaataacatggtgctagtgaaactggaccttcagaaaaaggcagcctgcattgctgagcagtatcacactgtgctaaagctccaaggccaagcctctgccaaaaagcggctgggagcaaaccaggaaaaccagcaaccaaatcatcaacccccaggaaagaaaccattcctgcgaaacttacttccccgaacacctacctgccaaagctcaacagacag

SEQ ID NO: 1627 - DNA, 332 bp, Mus musculus; identical to SEQ ID NO: 1626

SEQ ID NO: 1628 - DNA, 266 bp, Mus musculus
  misc_feature (194)..(194): n is a, c, g, or t
ctttctgtagacatatctgaagagatggattaagaatgctttggattaaggattgtggagcacatttcaatcattttaggattgtcaaaaggaggattgaggaggatcagatcaataatggaggcaatggtatgactccaagtgctattgtcacagatgaaattggcagtattgaccttatactagaaggcgangggttaaaaatttatctaccttaaaagatttgcaaacacttaatgcagttatcttcagctacaattgctttg

SEQ ID NO: 1629 - DNA, 266 bp, Mus musculus; identical to SEQ ID NO: 1628
  misc_feature (194)..(194): n is a, c, g, or t

SEQ ID NO: 1630 - DNA, 317 bp, Mus musculus
  misc_feature (87)..(118): n is a, c, g, or t
  misc_feature (155)..(169): n is a, c, g, or t
  misc_feature (229)..(229): n is a, c, g, or t
  misc_feature (231)..(231): n is a, c, g, or t
  misc_feature (233)..(233): n is a, c, g, or t
  misc_feature (241)..(241): n is a, c, g, or t
  misc_feature (243)..(243): n is a, c, g, or t
  misc_feature (245)..(245): n is a, c, g, or t
  misc_feature (247)..(247): n is a, c, g, or t
  misc_feature (250)..(250): n is a, c, g, or t
  misc_feature (252)..(252): n is a, c, g, or t
  misc_feature (277)..(277): n is a, c, g, or t
  misc_feature (282)..(282): n is a, c, g, or t
  misc_feature (289)..(289): n is a, c, g, or t
tcacctcagtggagcctctgaatgggaacctggtgaggaaagagtgtgcaaactcatgcacctccgactacagccagcagggccatnnnnnnnnnnnnnnnnnnnnnnnnnnnnnnnnccagactgacctatgcaacgagaggctggtcagcgcnnnnnnnnnnnnnnncctgctcagcagtgtcaccctgggcctggcaacgagcctcagcctgctcactgttatggntntntgcctgtnangnantgntnggaatttcccttgccccttcccttntagtngtcagtntccccacggcccatgctttagccatgat

SEQ ID NO: 1631 - DNA, 317 bp, Mus musculus; identical to SEQ ID NO: 1630
  misc_feature (87)..(118): n is a, c, g, or t
  misc_feature (155)..(169): n is a, c, g, or t
  misc_feature (229)..(229): n is a, c, g, or t
  misc_feature (231)..(231): n is a, c, g, or t
  misc_feature (233)..(233): n is a, c, g, or t
  misc_feature (241)..(241): n is a, c, g, or t
  misc_feature (243)..(243): n is a, c, g, or t
  misc_feature (245)..(245): n is a, c, g, or t
  misc_feature (247)..(247): n is a, c, g, or t
  misc_feature (250)..(250): n is a, c, g, or t
  misc_feature (252)..(252): n is a, c, g, or t
  misc_feature (277)..(277): n is a, c, g, or t
  misc_feature (282)..(282): n is a, c, g, or t
  misc_feature (289)..(289): n is a, c, g, or t

SEQ ID NO: 1632 - DNA, 184 bp, Mus musculus
  misc_feature (62)..(76): n is a, c, g, or t
gaaatatgcacaggtatcctcaggtacagagctacaatgtgcaagtggccaccacggactannnnnnnnnnnnnnnggtatttttccgaaagacttctgaaaacaagcaatacttcaaaattaccctgtatggaagaaccaaggagctgtcccctgaactgaaggaacgtttcacccgctttgc

SEQ ID NO: 1633 - DNA, 184 bp, Mus musculus; identical to SEQ ID NO: 1632
  misc_feature (62)..(76): n is a, c, g, or t

SEQ ID NO: 1634 - DNA, 299 bp, Mus musculus
  misc_feature (86)..(88): n is a, c, g, or t
  misc_feature (94)..(94): n is a, c, g, or t
  misc_feature (162)..(162): n is a, c, g, or t
  misc_feature (164)..(164): n is a, c, g, or t
  misc_feature (166)..(166): n is a, c, g, or t
  misc_feature (168)..(168): n is a, c, g, or t
  misc_feature (171)..(171): n is a, c, g, or t
cttgcagtttacagggctaggaggccaaacagagtctgcaagcaaaacccatgagcccttgaccctgctcctccggacactttgtnnncagccnctttgtcctccgacccgttaagctttcttttgcacttgaaaggagacccactgatatttccccacganancngnccnggctgcagcagttccagtgtggagagctccctctgctgaccagagtgaatcccaggctccgactggtctgcctttctctgcaggagccggagctccccaaccctccacaagcatctgctgcttcgtct

SEQ ID NO: 1635 - DNA, 299 bp, Mus musculus; identical to SEQ ID NO: 1634
  misc_feature (86)..(88): n is a, c, g, or t
  misc_feature (94)..(94): n is a, c, g, or t
  misc_feature (162)..(162): n is a, c, g, or t
  misc_feature (164)..(164): n is a, c, g, or t
  misc_feature (166)..(166): n is a, c, g, or t
  misc_feature (168)..(168): n is a, c, g, or t
  misc_feature (171)..(171): n is a, c, g, or t

SEQ ID NO: 1636 - DNA, 292 bp, Mus musculus
  misc_feature (38)..(38): n is a, c, g, or t
  misc_feature (172)..(186): n is a, c, g, or t
gcagttcttcaaaaaactgcccagcccgcctttcctgncgcccaccggcgccgactgccggtaacgcgcggcgtgggcctttgagactctgaacgacctatacctcagaccccgacagcggggagcagacgccgcccgaatcgctagtttctttgggacctgcgagcgacannnnnnnnnnnnnnnggcactggactgcgagagaagctatattaatctttccccttaaattattttttataatggtagcattttctacgtcttattaccattgcagctaaggtacatttgt

SEQ ID NO: 1637 - DNA, 292 bp, Mus musculus; identical to SEQ ID NO: 1636
  misc_feature (38)..(38): n is a, c, g, or t
  misc_feature (172)..(186): n is a, c, g, or t

SEQ ID NO: 1638 - DNA, 465 bp, Mus musculus
  misc_feature (47)..(84): n is a, c, g, or t
  misc_feature (199)..(199): n is a, c, g, or t
  misc_feature (213)..(213): n is a, c, g, or t
  misc_feature (225)..(226): n is a, c, g, or t
  misc_feature (230)..(230): n is a, c, g, or t
  misc_feature (233)..(233): n is a, c, g, or t
  misc_feature (241)..(241): n is a, c, g, or t
  misc_feature (300)..(320): n is a, c, g, or t
  misc_feature (377)..(377): n is a, c, g, or t
  misc_feature (379)..(379): n is a, c, g, or t
  misc_feature (440)..(440): n is a, c, g, or t
tctagaagcccctgaagaatccggacagtgtcacacagtgaacatgnnnnnnnnnnnnnnnnnnnnnnnnnnnnnnnnnnnnnncacatccttatgaaaagcaagggggtaggctgtcactcacatgccagtcgctaagaataagcagtaactaggaattattgagaagtgcaaacccagtattaatcagctctgaatntacagagccttatngcaacaagaaanncagnaantgagcaanttgggccacagatgggtaggaccactgtagaacaagagaggcacacactttcttgccannnnnnnnnnnnnnnnnnnnngtttttattttttattttctttgcagtgcagtgttgctggcccaacatagcaccttntnttttggataagtactatgttgtatttataccaattaattacttgaaacagtgatacatctntctttttgctgtgtcaagcctgcaa

SEQ ID NO: 1639 - DNA, 465 bp, Mus musculus; identical to SEQ ID NO: 1638
  misc_feature (47)..(84): n is a, c, g, or t
  misc_feature (199)..(199): n is a, c, g, or t
  misc_feature (213)..(213): n is a, c, g, or t
  misc_feature (225)..(226): n is a, c, g, or t
  misc_feature (230)..(230): n is a, c, g, or t
  misc_feature (233)..(233): n is a, c, g, or t
  misc_feature (241)..(241): n is a, c, g, or t
  misc_feature (300)..(320): n is a, c, g, or t
  misc_feature (377)..(377): n is a, c, g, or t
  misc_feature (379)..(379): n is a, c, g, or t
  misc_feature (440)..(440): n is a, c, g, or t

SEQ ID NO: 1640 - DNA, 530 bp, Mus musculus
  misc_feature (240)..(259): n is a, c, g, or t
  misc_feature (290)..(290): n is a, c, g, or t
  misc_feature (292)..(292): n is a, c, g, or t
  misc_feature (294)..(294): n is a, c, g, or t
  misc_feature (339)..(353): n is a, c, g, or t
  misc_feature (422)..(422): n is a, c, g, or t
  misc_feature (467)..(467): n is a, c, g, or t
  misc_feature (469)..(469): n is a, c, g, or t
  misc_feature (494)..(494): n is a, c, g, or t
  misc_feature (500)..(500): n is a, c, g, or t
tttttggcaaagacccagccaccgagtccaacatgaatgagcactgtgcatttttcttatggtctcgctccgttgttctcagagttgctcgaatcttcttctcctgcttgtagctgtattcttccacggtctccactcccttccccaaatctttatgtggagactgactcggtgtgttcattttttctttcaagttcgatcggctggccggcctccctgcgctgttcctctggtgcttgnnnnnnnnnnnnnnnnnnnntcgaggtgtgcttgggggtgaggtgccgtananantctctgtatttgtttcatcagaaaagtcctctggatcggattccnnnnnnnnnnnnnnngactctcccaacatgcactcctgcctcgccgctgggcagcactccggatccggctcgggctgtggcggnggtgctggccgcagctcctccatggcggctgcaggggtgtcggcnanggcaggagggggcaccggctcggcnatggcntctctcatccgtgcaccaagcttcgcatga

SEQ ID NO: 1641 - DNA, 530 bp, Mus musculus; identical to SEQ ID NO: 1640
  misc_feature (240)..(259): n is a, c, g, or t
  misc_feature (290)..(290): n is a, c, g, or t
  misc_feature (292)..(292): n is a, c, g, or t
  misc_feature (294)..(294): n is a, c, g, or t
  misc_feature (339)..(353): n is a, c, g, or t
  misc_feature (422)..(422): n is a, c, g, or t
  misc_feature (467)..(467): n is a, c, g, or t
  misc_feature (469)..(469): n is a, c, g, or t
  misc_feature (494)..(494): n is a, c, g, or t
  misc_feature (500)..(500): n is a, c, g, or t

SEQ ID NO: 1642 - DNA, 145 bp, Mus musculus
gggtaacattcctttttccagcaatttaattctttatttttttgtaaggctttggaagacccttgggaatcccccctttgattttttttggttgctttttaggggcagctgcaggagttttggttccatggattttcagagggcg

SEQ ID NO: 1643 - DNA, 145 bp, Mus musculus; identical to SEQ ID NO: 1642

SEQ ID NO: 1644 - DNA, 145 bp, Mus musculus; identical to SEQ ID NO: 1642

SEQ ID NO: 1645 - DNA, 100 bp, Mus musculus
tttaaagacaaactaggctgcgttttgagtacaggcgtttcagcagttgatgggtggtttatgttttgacagctggggatttttctgtcttcaagtcttg

SEQ ID NO: 1646 - DNA, 100 bp, Mus musculus; identical to SEQ ID NO: 1645

SEQ ID NO: 1647 - DNA, 100 bp, Mus musculus; identical to SEQ ID NO: 1645

SEQ ID NO: 1648 - DNA, 144 bp, Mus musculus
acctgcttggggtaaaactgagacactaaagattccttttgggacttctttggtttttccctgcttttaattcattttataaacccagggctggagtttggagaccctgctccttcttttcatggttttcattcatggtgacta

SEQ ID NO: 1649 - DNA, 144 bp, Mus musculus; identical to SEQ ID NO: 1648

SEQ ID NO: 1650 - DNA, 144 bp, Mus musculus; identical to SEQ ID NO: 1648

SEQ ID NO: 1651 - DNA, 391 bp, Mus musculus
  misc_feature (103)..(125): n is a, c, g, or t
  misc_feature (193)..(221): n is a, c, g, or t
  misc_feature (365)..(365): n is a, c, g, or t
tctctaccgtctcctggacctggatcctgagccccaaggggacgaggatccagatactcccaagtctgtgaggttccgagtgaaggagactgtatgtggcaannnnnnnnnnnnnnnnnnnnnnnaatgtgccttcaaggaacagggggtggtgaagcagtgtatgggggcagtcaccctgaacccggccgcnnnnnnnnnnnnnnnnnnnnnnnnnnnnnctggtgcacagccctttcggttcaagaaaatttcccggctggctggacttctccgcaaaggtggggagaagattggtgaaaagcttaagaaaattggccagaaaattaagaatttttttcagaaacttgtacctcagccagagnagtaggcctgccttggcctgtttctg

SEQ ID NO: 1652 - DNA, 391 bp, Mus musculus; identical to SEQ ID NO: 1651
  misc_feature (103)..(125): n is a, c, g, or t
  misc_feature (193)..(221): n is a, c, g, or t
  misc_feature (365)..(365): n is a, c, g, or t

SEQ ID NO: 1653 - DNA, 222 bp, Mus musculus
aaattctactggaagggctggaggcgtggtttctctgtcttcctgggtgtggccatcttgatctacctgctgttctacagaaagggctttggggaccagaataacagataaagctggtgttagaagatgttccgtttttaaaaaagaaatagttagaattctgctcagagctttaatgattcacagtgcagtgacttggcatcaactttgctaaggttctgt

SEQ ID NO: 1654 - DNA, 222 bp, Mus musculus; identical to SEQ ID NO: 1653

SEQ ID NO: 1655 - DNA, 357 bp, Mus musculus
ggctcactgcatacttatatccctgaaacgacatctttagagctggcctcatcacagttgtgactatttctgctccagtgaagagaattgttagatttgctggaaactgaggcttactaacagtttttgtttaaagaccacagagattgtagacttaggagctatatggtactacttataggttcaaaaaattgtttacttatgtgtcgtagaagtgtttattttgaggaaactatttttttttttgccaaattctacttagtcaaatcatcttctatgtcttgctgttttttaaatcattaagctatcataaaatattttttaaaaaaatctcaactatattgataacctgcagtg

SEQ ID NO: 1656 - DNA, 357 bp, Mus musculus; identical to SEQ ID NO: 1655

SEQ ID NO: 1657 - DNA, 356 bp, Mus musculus
  misc_feature (213)..(232): n is a, c, g, or t
  misc_feature (292)..(306): n is a, c, g, or t
cagctagcagctaaagtaattcaacccatgcattgctagtgtcacagcctttggttatgtctagtagctgtttctgaagtattttcatttatcttttgtcaaatttaaccctgtttgaattctctcctttcctcaaggagacacttatgttcaaagtgttgattctttgccttaggtgcatagagagtagacagtttggagatggaaaggttnnnnnnnnnnnnnnnnnnnnttctgtgttggaatttgtgctagcagtttgagcactagctctgcgtgcctatgaactgannnnnnnnnnnnnnnttccattttatgtcatggagaaataattccacttggtaacacaaaggcta

SEQ ID NO: 1658 - DNA, 356 bp, Mus musculus; identical to SEQ ID NO: 1657
  misc_feature (213)..(232): n is a, c, g, or t
  misc_feature (292)..(306): n is a, c, g, or t

SEQ ID NO: 1659 - DNA, 287 bp, Mus musculus
  misc_feature (82)..(82): n is a, c, g, or t
  misc_feature (202)..(202): n is a, c, g, or t
gctacggagggggctcttccggaggaggtggtagctgtggaggtggctcctctggcggcggtggcggcggtggctgctactncagcggtggtggcggcagcagcggtggctgcggtggaggctactccggaggcggcggtggctgtggcggcggctcttccgggggcagcggcggtggctgcggaggtggctcttccggagncagcggcggtggctgcggaggaggctactccggaggcggaggcggtggctccagctgcggaggcggctcctctggtggcggctct

SEQ ID NO: 1660 - DNA, 287 bp, Mus musculus; identical to SEQ ID NO: 1659
  misc_feature (82)..(82): n is a, c, g, or t
  misc_feature (202)..(202): n is a, c, g, or t

SEQ ID NO: 1661 - DNA, 208 bp, Mus musculus
gtggccatgaagttccttcgggcctctgaagaacacctgaagcagcattacatcgacctgaaagaccgtcctttcttcccggggctggtgaagtacatgaactcggggcccgtggtggccatggtctgggaggggctcaatgtggtgaaaacgggccgagtgatgctgggggagaccaatccagctgattcaaaaccaggcaccatcc

SEQ ID NO: 1662 - DNA, 208 bp, Mus musculus; identical to SEQ ID NO: 1661

SEQ ID NO: 1663 - DNA, 424 bp, Mus musculus
  misc_feature (82)..(120): n is a, c, g, or t
  misc_feature (151)..(152): n is a, c, g, or t
  misc_feature (157)..(157): n is a, c, g, or t
  misc_feature (165)..(165): n is a, c, g, or t
  misc_feature (179)..(179): n is a, c, g, or t
  misc_feature (185)..(228): n is a, c, g, or t
  misc_feature (291)..(291): n is a, c, g, or t
  misc_feature (293)..(293): n is a, c, g, or t
  misc_feature (320)..(355): n is a, c, g, or t
gttgctgctgctgctctccagttccgccgcgctccctgcacctcccaggaccccaagacactcagacggaatgttcaccagnnnnnnnnnnnnnnnnnnnnnnnnnnnnnnnnnnnnnnncctgctgcagggtctggtggggaagcgcagnnagcangacacagnaaatatcccagagnacagcnnnnnnnnnnnnnnnnnnnnnnnnnnnnnnnnnnnnnnnnnnnngtcgaacactcagaccctacaggactggcttctgcccaggctgtccctggatgggtccctgtntntctggctgcctcctggaccaaggtctnnnnnnnnnnnnnnnnnnnnnnnnnnnnnnnnnnnnccacccagatgagggaggaagagtctctaggaccctggctggagtagggattggttgtccttggcatca

SEQ ID NO: 1664 - DNA, 424 bp, Mus musculus; identical to SEQ ID NO: 1663
  misc_feature (82)..(120): n is a, c, g, or t
  misc_feature (151)..(152): n is a, c, g, or t
  misc_feature (157)..(157): n is a, c, g, or t
  misc_feature (165)..(165): n is a, c, g, or t
  misc_feature (179)..(179): n is a, c, g, or t
  misc_feature (185)..(228): n is a, c, g, or t
  misc_feature (291)..(291): n is a, c, g, or t
  misc_feature (293)..(293): n is a, c, g, or t
  misc_feature (320)..(355): n is a, c, g, or t

SEQ ID NO: 1665 - DNA, 189 bp, Mus musculus
  misc_feature (123)..(161): n is a, c, g, or t
ccgaccatggagcctccgctgcccacgccgatgctactgctgttgctgctgctgctctccagttccgccgcgctccctgcacctcccaggaccccaagacactcagacggaatgttcaccagnnnnnnnnnnnnnnnnnnnnnnnnnnnnnnnnnnnnnnncctgctgcagggtctggtggggaagcgc

SEQ ID NO: 1666 - DNA, 189 bp, Mus musculus; identical to SEQ ID NO: 1665
  misc_feature (123)..(161): n is a, c, g, or t

SEQ ID NO: 1667 - DNA, 280 bp, Mus musculus
  misc_feature (53)..(53): n is a, c, g, or t
  misc_feature (75)..(75): n is a, c, g, or t
  misc_feature (104)..(104): n is a, c, g, or t
  misc_feature (121)..(121): n is a, c, g, or t
  misc_feature (137)..(137): n is a, c, g, or t
gggaagctgctgtggcccagctcctccctcctcatcttgccgtcccactgggntgctaggaaatccaggatgacngctgctctgatatggtgctcttctgaggnggcataagggctggccnttatttgctctccctncttcgacttgcagaaattaatttaattaattaatttactatattaaagcccttggtcacccaagggctcagaaaacaagctgtgacaagcagaaaccatgtctaggggtgtgcagcccttgacccaaagcttaagccttgtgc

SEQ ID NO: 1668 - DNA, 280 bp, Mus musculus; identical to SEQ ID NO: 1667
  misc_feature (53)..(53): n is a, c, g, or t
  misc_feature (75)..(75): n is a, c, g, or t
  misc_feature (104)..(104): n is a, c, g, or t
  misc_feature (121)..(121): n is a, c, g, or t
  misc_feature (137)..(137): n is a, c, g, or t

SEQ ID NO: 1669 - DNA, 313 bp, Mus musculus
  misc_feature (33)..(50): n is a, c, g, or t
  misc_feature (197)..(197): n is a, c, g, or t
  misc_feature (281)..(281): n is a, c, g, or t
ttctagcccagtgatcagtcatggcatgccctnnnnnnnnnnnnnnnnnnttctcgtggccatcttccacaagtactctggcaaggaaggtgacaagcacaccctgagcaagaaggagctgaaggagttgatccagaaggagctcaccattggctccaagctgcaggatgctgaaattgcaaggctgatggatgatntggaccgtaacaaggatcaggaagtaaacttccaggagtatgtcgccttcctgggggccttggctttgatctacaatgaagctntgaaataaaatgggaccgttgagatgacttcc

SEQ ID NO: 1670 - DNA, 313 bp, Mus musculus; identical to SEQ ID NO: 1669
  misc_feature (33)..(50): n is a, c, g, or t
  misc_feature (197)..(197): n is a, c, g, or t
  misc_feature (281)..(281): n is a, c, g, or t

SEQ ID NO: 1671 - DNA, 432 bp, Mus musculus
  misc_feature (126)..(140): n is a, c, g, or t
  misc_feature (351)..(351): n is a, c, g, or t
  misc_feature (353)..(353): n is a, c, g, or t
ctggacaagcttttaggaagtttcttccgctctttgacagagtattggttgaaaggagtgctgccgaaactgtaaccaaaggtggcattatgcttccagaaaagtctcaaggaaaagtgttgcaannnnnnnnnnnnnnngtggggtcaggagggaaaggaaagagtggagagattgagcctgtcagtgtgaaagttggagataaagttcttctcccagaatatggaggcaccaaagtagttctagatgacaaggattatttcttatttagagatagtgacattcttggaaagtatgtcgactgaaatcactgttgaaatggtgtcacgtgaagctgccattccactgatntntgaactatttcatcatgtaaataatttccatgcctcccttttataataaacagatgatgcctaaactgacagccattgt

SEQ ID NO: 1672 - DNA, 432 bp, Mus musculus; identical to SEQ ID NO: 1671
  misc_feature (126)..(140): n is a, c, g, or t
  misc_feature (351)..(351): n is a, c, g, or t
  misc_feature (353)..(353): n is a, c, g, or t

SEQ ID NO: 1673 - DNA, 148 bp, Mus musculus
  misc_feature (90)..(90): n is a, c, g, or t
  misc_feature (106)..(106): n is a, c, g, or t
tgggcaccatcttcatcattcaaggcctgcgatcaggtggcacctccagacacccagggcctttatgagtcacaccctggaaaggaaggngtgtgtccctcttcanggaagaagtggtgtgctgggtgacctggcacagtgtgttttc

SEQ ID NO: 1674 - DNA, 148 bp, Mus musculus; identical to SEQ ID NO: 1673
  misc_feature (90)..(90): n is a, c, g, or t
  misc_feature (106)..(106): n is a, c, g, or t

SEQ ID NO: 1675 - DNA, 552 bp, Mus musculus
ccatctgagctgttctgtcctatcctgttcggtctcaatcctatcatgcaagattgaggcccttagggtacctgacaacgggcactaatacaccccatggctgtttccacaggacacttttgctgcaatctagagactttagctggagtgtgttgagggctcacaacagtcccctggagtcacagcccaggacctttgacaggccctcctgccagccttcgggcaggtgaggaagaacctgcctgcagagggctgctggttgtgtgttcatgagaacatggaatttcacagtgatagatggcccagggttaggatgctctggtggggggaagggaaggactgggctatctcggcagtccaagccacgtccaggaaaactgctgtcccgtgaccttcactggtccatcagctccaaagtaaaaccgaaaagctaatcttgcatggaattgcctattgatacgtattgacagtcttctgccctgtgtctcttggaaaaattggaaaccagataggtttggttttgttttgagaccaaatcgtcactatgtaggg

SEQ ID NO: 1676 - DNA, 552 bp, Mus musculus; identical to SEQ ID NO: 1675

SEQ ID NO: 1677 - DNA, 446 bp, Mus musculus
  misc_feature (72)..(72): n is a, c, g, or t
  misc_feature (80)..(81): n is a, c, g, or t
  misc_feature (84)..(85): n is a, c, g, or t
  misc_feature (87)..(96): n is a, c, g, or t
  misc_feature (99)..(100): n is a, c, g, or t
  misc_feature (103)..(105): n is a, c, g, or t
  misc_feature (300)..(300): n is a, c, g, or t
ggctttggatcctccctgttagttcttcatgtggttttacttagaaatccaaggtttgggtaagactccccntccccacnnctnntnnnnnnnnnntgnnttnnnccccgtggtagcatgttaaacgattataatgaaacagctgaacaaaaacatttttaaggtaaaataaaaatttatatataattagtattacatttagcttttcattgaactgacaggaaaaaaatcagtgatattgggagattggaaaaaaatttcttaaactggagtgatttgataatccttctatggtatcanggggagaaaaataaagtttatttgagttcactgtcctcccttaaaagcatccttcgagcaataaatgaatattgtctttaaaccaagggttagggatttctcttctcttctcttctcttatctagcggcggcgaggcgaaactaca

SEQ ID NO: 1678 - DNA, 446 bp, Mus musculus; identical to SEQ ID NO: 1677
  misc_feature (72)..(72): n is a, c, g, or t
  misc_feature (80)..(81): n is a, c, g, or t
  misc_feature (84)..(85): n is a, c, g, or t
  misc_feature (87)..(96): n is a, c, g, or t
  misc_feature (99)..(100): n is a, c, g, or t
  misc_feature (103)..(105): n is a, c, g, or t
  misc_feature (300)..(300): n is a, c, g, or t

SEQ ID NO: 1679 - DNA, 263 bp, Mus musculus
gcatccttcgagcaataaatgaatattgtctttaaaccaagggttagggatttctcttctcttctcttctcttatctagcggcggcgaggcgaaactacactaaactaaactcagtctaactaaatcaatctctgactaactctctctctttcactgtctctctctctctgcctctctttgttcatctttaaacatttgggaccacctgggcttccttgtcttcgctggccacattggaagcagtcctagctgcactgtgttg

SEQ ID NO: 1680 - DNA, 263 bp, Mus musculus; identical to SEQ ID NO: 1679

SEQ ID NO: 1681 - DNA, 407 bp, Mus musculus
  misc_feature (34)..(61): n is a, c, g, or t
  misc_feature (128)..(128): n is a, c, g, or t
  misc_feature (130)..(131): n is a, c, g, or t
  misc_feature (133)..(133): n is a, c, g, or t
  misc_feature (155)..(155): n is a, c, g, or t
  misc_feature (161)..(161): n is a, c, g, or t
  misc_feature (167)..(167): n is a, c, g, or t
  misc_feature (178)..(192): n is a, c, g, or t
  misc_feature (244)..(244): n is a, c, g, or t
  misc_feature (249)..(249): n is a, c, g, or t
  misc_feature (252)..(252): n is a, c, g, or t
  misc_feature (281)..(282): n is a, c, g, or t
  misc_feature (284)..(285): n is a, c, g, or t
  misc_feature (287)..(288): n is a, c, g, or t
  misc_feature (290)..(296): n is a, c, g, or t
  misc_feature (298)..(303): n is a, c, g, or t
  misc_feature (310)..(311): n is a, c, g, or t
  misc_feature (314)..(314): n is a, c, g, or t
  misc_feature (317)..(317): n is a, c, g, or t
  misc_feature (319)..(322): n is a, c, g, or t
  misc_feature (335)..(335): n is a, c, g, or t
  misc_feature (344)..(344): n is a, c, g, or t
  misc_feature (353)..(353): n is a, c, g, or t
  misc_feature (362)..(362): n is a, c, g, or t
  misc_feature (365)..(368): n is a, c, g, or t
  misc_feature (374)..(376): n is a, c, g, or t
  misc_feature (378)..(378): n is a, c, g, or t
acaacatccaaatgcgagaaaggacccagcaacnnnnnnnnnnnnnnnnnnnnnnnnnnnntcctgattacaatccgcagaacatccggaatgacatcatgcttctgcagctgaggcgcagagcccgngnngngtggatcggtgaagcctgtggntctgcntcaggncagcaaaaaannnnnnnnnnnnnnnttgtgcacagtggctggctggggcggggtaagccagagcaggggaacaaatngtacntcnaggaggtgcagctaagagtgcagatggannanntnngnnnnnnncnnnnnnagttctnnaanagncnnnntcagatctgtgtngggaaaccngagagaaangaagtctgnctnnnngggtgnnncnggtggccccctggtatgtagcaatgtggc

SEQ ID NO: 1682 - DNA, 407 bp, Mus musculus; identical to SEQ ID NO: 1681
  misc_feature (34)..(61): n is a, c, g, or t
  misc_feature (128)..(128): n is a, c, g, or t
  misc_feature (130)..(131): n is a, c, g, or t
  misc_feature (133)..(133): n is a, c, g, or t
  misc_feature (155)..(155): n is a, c, g, or t
  misc_feature (161)..(161): n is a, c, g, or t
  misc_feature (167)..(167): n is a, c, g, or t
  misc_feature (178)..(192): n is a, c, g, or t
  misc_feature (244)..(244): n is a, c, g, or t
  misc_feature (249)..(249): n is a, c, g, or t
  misc_feature (252)..(252): n is a, c, g, or t
  misc_feature (281)..(282): n is a, c, g, or t
  misc_feature (284)..(285): n is a, c, g, or t
  misc_feature (287)..(288): n is a, c, g, or t
  misc_feature (290)..(296): n is a, c, g, or t
  misc_feature (298)..(303): n is a, c, g, or t
  misc_feature (310)..(311): n is a, c, g, or t
  misc_feature (314)..(314): n is a, c, g, or t
  misc_feature (317)..(317): n is a, c, g, or t
  misc_feature (319)..(322): n is a, c, g, or t
  misc_feature (335)..(335): n is a, c, g, or t
  misc_feature (344)..(344): n is a, c, g, or t
  misc_feature (353)..(353): n is a, c, g, or t
  misc_feature (362)..(362): n is a, c, g, or t
  misc_feature (365)..(368): n is a, c, g, or t
  misc_feature (374)..(376): n is a, c, g, or t
  misc_feature (378)..(378): n is a, c, g, or t

SEQ ID NO: 1683 - DNA, 381 bp, Mus musculus
  misc_feature (39)..(39): n is a, c, g, or t
  misc_feature (43)..(44): n is a, c, g, or t
  misc_feature (57)..(57): n is a, c, g, or t
  misc_feature (78)..(78): n is a, c, g, or t
  misc_feature (84)..(84): n is a, c, g, or t
  misc_feature (152)..(152): n is a, c, g, or t
  misc_feature (185)..(185): n is a, c, g, or t
  misc_feature (232)..(232): n is a, c, g, or t
  misc_feature (326)..(326): n is a, c, g, or t
  misc_feature (329)..(329): n is a, c, g, or t
  misc_feature (333)..(333): n is a, c, g, or t
  misc_feature (349)..(349): n is a, c, g, or t
tacaccctgcaggtcaaccagagctcccgctcagagccncagnnatacaatgtctcnatcccccacttctgggtcccnaacgcnggtgccatctccttccgggtcaagtcgaggtcagaggtttaccctcggaagctcagcagctggagcgnagcctggggcctcgtctgccccccagaggtgangcctgtgaagacagccttggtgacttcagtggctacggtgctggggncagggctcgtggcagctgggctcctgctgtggtggaggaagtcgctgctctaccgcctgtgcccacccattccacgcctgcgcctgcccttggnagnggangatggtcgtgtggganccagctcttgaagactgcgaggtgacgcctgt

SEQ ID NO: 1684 - DNA, 381 bp, Mus musculus; identical to SEQ ID NO: 1683
  misc_feature (39)..(39): n is a, c, g, or t
  misc_feature (43)..(44): n is a, c, g, or t
  misc_feature (57)..(57): n is a, c, g, or t
  misc_feature (78)..(78): n is a, c, g, or t
  misc_feature (84)..(84): n is a, c, g, or t
  misc_feature (152)..(152): n is a, c, g, or t
  misc_feature (185)..(185): n is a, c, g, or t
  misc_feature (232)..(232): n is a, c, g, or t
  misc_feature (326)..(326): n is a, c, g, or t
  misc_feature (329)..(329): n is a, c, g, or t
  misc_feature (333)..(333): n is a, c, g, or t
  misc_feature (349)..(349): n is a, c, g, or t

SEQ ID NO: 1685 - DNA, 284 bp, Mus musculus
  misc_feature (70)..(70): n is a, c, g, or t
  misc_feature (76)..(76): n is a, c, g, or t
  misc_feature (78)..(79): n is a, c, g, or t
catctgcttgtctcgggcgagatggcttcaaggttacttcgcggagtgggcgctttggcggcgcaggccntgaggncnnacggccccgtggcgcggccgtgacccgctccatggcttctggaggtggtgtccccactgatgaggagcaggctactgggctggagagggagatcatgatagcagcacagaagggactggacccatacaatatgctacctccaaaggcagcttcaggcaccaaggaagaccctaatctagtcccgtccatcagcaacaagagaata

SEQ ID NO: 1686 - DNA, 284 bp, Mus musculus; identical to SEQ ID NO: 1685
  misc_feature (70)..(70): n is a, c, g, or t
  misc_feature (76)..(76): n is a, c, g, or t
  misc_feature (78)..(79): n is a, c, g, or t

SEQ ID NO: 1687 - DNA, 317 bp, Mus musculus
  misc_feature (54)..(54): n is a, c, g, or t
  misc_feature (86)..(86): n is a, c, g, or t
  misc_feature (106)..(106): n is a, c, g, or t
  misc_feature (144)..(144): n is a, c, g, or t
  misc_feature (157)..(157): n is a, c, g, or t
  misc_feature (162)..(162): n is a, c, g, or t
  misc_feature (204)..(204): n is a, c, g, or t
  misc_feature (214)..(214): n is a, c, g, or t
  misc_feature (217)..(217): n is a, c, g, or t
ccttttcgcctacagtcggggtctgcctagagtatgcagaccatgccctggccnttctatgctgtccgagacggaaagctgagccnttcttcggaggctcaaagcntcccggcctcgccgcagcggtgctctggcctcccccantgacccttttcanagtcncctggacagccatttttccgggctcttcaaccacaggctcangcctgccttnttnctggagagtgtggacgcccatctgcagattggacctctcaagaaatcgtgcataaccgtgctgaagaggaggtgatgcacgcccggctgggtcatcctgt

SEQ ID NO: 1688 - DNA, 317 bp, Mus musculus; identical to SEQ ID NO: 1687
  misc_feature (54)..(54): n is a, c, g, or t
  misc_feature (86)..(86): n is a, c, g, or t
  misc_feature (106)..(106): n is a, c, g, or t
  misc_feature (144)..(144): n is a, c, g, or t
  misc_feature (157)..(157): n is a, c, g, or t
  misc_feature (162)..(162): n is a, c, g, or t
  misc_feature (204)..(204): n is a, c, g, or t
  misc_feature (214)..(214): n is a, c, g, or t
  misc_feature (217)..(217): n is a, c, g, or t

SEQ ID NO: 1689 - DNA, 455 bp, Mus musculus
  misc_feature (36)..(36): n is a, c, g, or t
  misc_feature (67)..(67): n is a, c, g, or t
  misc_feature (101)..(101): n is a, c, g, or t
  misc_feature (153)..(217): n is a, c, g, or t
  misc_feature (229)..(243): n is a, c, g, or t
  misc_feature (290)..(291): n is a, c, g, or t
  misc_feature (337)..(353): n is a, c, g, or t
  misc_feature (385)..(385): n is a, c, g, or t
  misc_feature (403)..(403): n is a, c, g, or t
attgctgcataccgtgccaagggcaaaagtgaagcnaggaaagaagggtcctggtaggccaacaggnctcaaagaagaagaacgaaccagaagatgaggangaggaagaagaggaggaagaggaggaagatgacgaggaagaagaggaggatnnnnnnnnnnnnnnnnnnnnnnnnnnnnnnnnnnnnnnnnnnnnnnnnnnnnnnnnnnnnnnnnntgaaattcaagnnnnnnnnnnnnnnngcttcagtataaaaactgtacagatttttgtatagctgatgagattnntttgtagagaaaatactttttaagaagagtttgtagctttttcagnnnnnnnnnnnnnnnnnttagatttaaagcttttgatgttgaatgtttntaaatatttaatggtttntttaatttcttatgctagcaaaaaaaaaacttcataggaatttgtattacca

SEQ ID NO: 1690 - DNA, 455 bp, Mus musculus; identical to SEQ ID NO: 1689
  misc_feature (36)..(36): n is a, c, g, or t
  misc_feature (67)..(67): n is a, c, g, or t
  misc_feature (101)..(101): n is a, c, g, or t
  misc_feature (153)..(217): n is a, c, g, or t
  misc_feature (229)..(243): n is a, c, g, or t
  misc_feature (290)..(291): n is a, c, g, or t
  misc_feature (337)..(353): n is a, c, g, or t
  misc_feature (385)..(385): n is a, c, g, or t
  misc_feature (403)..(403): n is a, c, g, or t

SEQ ID NO: 1691 - DNA, 466 bp, Mus musculus
  misc_feature (105)..(105): n is a, c, g, or t
  misc_feature (214)..(231): n is a, c, g, or t
  misc_feature (305)..(305): n is a, c, g, or t
  misc_feature (350)..(350): n is a, c, g, or t
  misc_feature (393)..(393): n is a, c, g, or t
  misc_feature (395)..(395): n is a, c, g, or t
  misc_feature (398)..(398): n is a, c, g, or t
aagacaacgcggtccctcagctgcaacagtgtgcctatgagtgcccagaagtcactccccgcagacgcttcactgaagaatgggggctccttccgggccagaatnttttccgggttcccagaacaaatgatgatgatgaagaaaggtgccttcaaaaagctgatcaagttctacagcgtccccagctttcctgaatgcagttctcagtgtgctnnnnnnnnnnnnnnnnnncccctggaggccatggtgtagagtcctcaatcagaatgcaagagtgcctgtgcttcagggagttggggaacccntcgaaattgcgtgcagtttgtgtgcttattatgtgtgtgtgcatnttgagggaagcaagcccattattttgatcataacctcacaggntnttngtgatccacaacagattgtaactgggaagtttaagcgggcatgctccagaggttgcaggcgcttgtgt

SEQ ID NO: 1692 - DNA, 466 bp, Mus musculus; identical to SEQ ID NO: 1691
  misc_feature (105)..(105): n is a, c, g, or t
  misc_feature (214)..(231): n is a, c, g, or t
  misc_feature (305)..(305): n is a, c, g, or t
  misc_feature (350)..(350): n is a, c, g, or t
  misc_feature (393)..(393): n is a, c, g, or t
  misc_feature (395)..(395): n is a, c, g, or t
  misc_feature (398)..(398): n is a, c, g, or t

SEQ ID NO: 1693 - DNA, 263 bp, Mus musculus
  misc_feature (75)..(89): n is a, c, g, or t
tgaagtgcctgctttctaggtaggggtgagcgcctgaggggagaggttgctttttagccctactgttgggcagannnnnnnnnnnnnnnaagggtggcccagtgtaaatcacagggcaccttagacggtctggagaaggaaggtaccagaaacctcttctgaggaataaactataggagacaataaaatataacacagtacccaggaagttgattgctttctttatgaagcagaaggggaattatgacgcatggctacagtta

SEQ ID NO: 1694 - DNA, 263 bp, Mus musculus; identical to SEQ ID NO: 1693
  misc_feature (75)..(89): n is a, c, g, or t

SEQ ID NO: 1695 - DNA, 541 bp, Mus musculus
  misc_feature (35)..(35): n is a, c, g, or t
  misc_feature (65)..(79): n is a, c, g, or t
  misc_feature (111)..(111): n is a, c, g, or t
  misc_feature (126)..(126): n is a, c, g, or t
  misc_feature (142)..(142): n is a, c, g, or t
  misc_feature (223)..(223): n is a, c, g, or t
  misc_feature (228)..(229): n is a, c, g, or t
  misc_feature (357)..(357): n is a, c, g, or t
  misc_feature (386)..(386): n is a, c, g, or t
  misc_feature (389)..(389): n is a, c, g, or t
  misc_feature (410)..(410): n is a, c, g, or t
  misc_feature (414)..(414): n is a, c, g, or t
  misc_feature (420)..(420): n is a, c, g, or t
  misc_feature (458)..(458): n is a, c, g, or t
  misc_feature (515)..(515): n is a, c, g, or t
gctcttctttctagacctgaagcagggacgctatntacccctggatgagagagtccatgcccgcnnnnnnnnnnnnnnnttctcactctgagcctggagagtgggctgggnctggactcctgagancctgggagcctgacanccctcttcgggtgcttctcctgcctggccacatggacagcagcacctgtgagagtaggaaaatggaacctgagtggctggnacccnnctcctacttcccactatgcatccattttgcctctgccttgatctttttctccatctcttttctccctacccagcaggagccccacaaacacatgttggctgctgtgtcctgcagttggaccagtgtcnaggggtacaggcttcaggctgtgacccanacntggtacccacctccctttccnattntgcctnaggttcatccacggttcccctgtggagcaagtgggggnccacatagctgctgtccctgctgagggttggtagcaatcacaccctcatgtcagctngggagacacgcgcagtctcccactga

SEQ ID NO: 1696 - DNA, 541 bp, Mus musculus; identical to SEQ ID NO: 1695
  misc_feature (35)..(35): n is a, c, g, or t
  misc_feature (65)..(79): n is a, c, g, or t
  misc_feature (111)..(111): n is a, c, g, or t
  misc_feature (126)..(126): n is a, c, g, or t
  misc_feature (142)..(142): n is a, c, g, or t
  misc_feature (223)..(223): n is a, c, g, or t
  misc_feature (228)..(229): n is a, c, g, or t
  misc_feature (357)..(357): n is a, c, g, or t
  misc_feature (386)..(386): n is a, c, g, or t
  misc_feature (389)..(389): n is a, c, g, or t
  misc_feature (410)..(410): n is a, c, g, or t
  misc_feature (414)..(414): n is a, c, g, or t
  misc_feature (420)..(420): n is a, c, g, or t
  misc_feature (458)..(458): n is a, c, g, or t
  misc_feature (515)..(515): n is a, c, g, or t

SEQ ID NO: 1697 - DNA, 235 bp, Mus musculus
  misc_feature (158)..(176): n is a, c, g, or t
cagttgagatatctcctctacagaagggttctggcttgtagagctactgttggttcacggctgctcccatagaggtgccctgtagttttctggctagaaagttcatcccttcagttcttgataggctggtagcagagccagctggaacctatggcagnnnnnnnnnnnnnnnnnnngacccagaaccagacagcctggtctagcccccgctgtgccacacctgtgcaaaggacca

SEQ ID NO: 1698 - DNA, 235 bp, Mus musculus; identical to SEQ ID NO: 1697
  misc_feature (158)..(176): n is a, c, g, or t

SEQ ID NO: 1699 - DNA, 564 bp, Mus musculus
  misc_feature (67)..(67): n is a, c, g, or t
  misc_feature (78)..(78): n is a, c, g, or t
  misc_feature (83)..(83): n is a, c, g, or t
  misc_feature (90)..(90): n is a, c, g, or t
  misc_feature (97)..(97): n is a, c, g, or t
  misc_feature (100)..(100): n is a, c, g, or t
  misc_feature (104)..(104): n is a, c, g, or t
  misc_feature (131)..(131): n is a, c, g, or t
cgtctgtggcgatctctgcgtctctggtactgcccctgctgtcaacacaagagtgtgcagcgccccntgcagcggaancgtgntggtggncaccccnaantgcntgcgccccctgcgccggggcaggcgcntgcagcggaggctgtaagaagtgctaggaggtcacaatgctgcaagccactggcacgggctaccctgcccgaagggacagcacagcgggacagtggcctcggcgcctttatttcaatctgtagctttccctagcaacttgttcctagagttcttgctttctttccctttctgcctttttgctggattcattggtcttaggatcttggaggatccgctgccccaggatcctctttgtctgactttacccgggtccttagcacgcttttgcctgggcaaggagacatggatccacatggttgcctgctttcctgacactccgctagaaaccacgtgacccagagcatcttcttccgggtctgcctggcagcagctcccccaaacgaggggctcagctgcctgttccttgggctttgtctctctttgcgttcccaa

SEQ ID NO: 1700 - DNA, 564 bp, Mus musculus; identical to SEQ ID NO: 1699
  misc_feature (67)..(67): n is a, c, g, or t
  misc_feature (78)..(78): n is a, c, g, or t
  misc_feature (83)..(83): n is a, c, g, or t
  misc_feature (90)..(90): n is a, c, g, or t
  misc_feature (97)..(97): n is a, c, g, or t
  misc_feature (100)..(100): n is a, c, g, or t
  misc_feature (104)..(104): n is a, c, g, or t
  misc_feature (131)..(131): n is a, c, g, or t

SEQ ID NO: 1701 - DNA, 419 bp, Mus musculus
  misc_feature (254)..(254): n is a, c, g, or t
  misc_feature (306)..(306): n is a, c, g, or t
  misc_feature (345)..(345): n is a, c, g, or t
  misc_feature (366)..(366): n is a, c, g, or t
gacgctgccgtggaggcgttaccaccctttgctttcctgaccatcggcatgggcaagatcctgctgggttccggagcgagttccaatgcagggctgacagggagggatggccccaccgccagctgcacagtgcccctgccaccccgcctaggtatctgtttggactacgagcgggggcgggtctccttcctggatgccgtgtccttccgtgggctgctcgagtgccccctggactgctcagggcctgtgtgccntgccttctgcttcattgggggtggcgctgttcagctgcaggagcccgtggcnaccaagcctgagaggaaagtcaccattgggggctttgcnaaactggactgagccgttcangcccctctcagacctgagttctgctccccaagtctctggcatcgagtttgttt

SEQ ID NO: 1702 - DNA, 419 bp, Mus musculus; identical to SEQ ID NO: 1701
  misc_feature (254)..(254): n is a, c, g, or t
  misc_feature (306)..(306): n is a, c, g, or t
  misc_feature (345)..(345): n is a, c, g, or t
  misc_feature (366)..(366): n is a, c, g, or t

SEQ ID NO: 1703 - DNA, 272 bp, Mus musculus
acgatagtactgtccctcttttctgaaccatcagaagacacaaaactgttagtgacacaacggtgacaggtagctgggacctaggctatcttattatgaaggttgttttgcttgttgtatatttgtgtatgtagtgtaacgaatttgtaccatagaggactgtccgtaactactgtttagcttctacacattgaaatgtagatgtttcattggctgtctgaaaaggtgtggcttgtccttcctagagagatctacttaaaaactgctttgtg

SEQ ID NO: 1704 - DNA, 272 bp, Mus musculus; identical to SEQ ID NO: 1703

SEQ ID NO: 1705 - DNA, 530 bp, Mus musculus
  misc_feature (316)..(449): n is a, c, g, or t
gaaggaactctaaacagctccagcaaggcgagcctggctctgtctggtaggcctggcccttctctcccattccttctaccttactaaaagctgttagagaacagtcctaaagctagcccccaaggtctattcccttatttggccacttcctcctcctgaggctgactacaaggtccagctatccaagtactgaagtctaacatcaaaagccccctttgtctcacctaagtagcaatgcccaatcaaaatacaccatcacatcatagcccagtctaacagaccgccctttttctcttcataaaattacacctgcaannnnnnnnnnnnnnnnnnnnnnnnnnnnnnnnnnnnnnnnnnnnnnnnnnnnnnnnnnnnnnnnnnnnnnnnnnnnnnnnnnnnnnnnnnnnnnnnnnnnnnnnnnnnnnnnnnnnnnnnnnnnnnnnnnnnnnaagaaagaaaaaaaaaaaaaattacacctgcgaggtcacttgggctgctgtttttctgcctgagtcagagggcagccactt

SEQ ID NO: 1706 - DNA, 530 bp, Mus musculus; identical to SEQ ID NO: 1705
  misc_feature (316)..(449): n is a, c, g, or t

SEQ ID NO: 1707 - DNA, 617 bp, Mus musculus
catctgtgtccctggcgtacgagaaggctgagagcgacatcatgcacctgcgcccacggaaccctaagcgtgaccggttggtcaacgaacccctggctgcttattcctatttccagattggtgccattcagtcatttgccggctttgctgactacttcacggccatggcgcaggagggctggttccctctgttgtgtgtaggactgcggccacaatgggaggaccaccatctacaagatcttcaagacagctacggccaggaatggacatttggtcagcgcctgtaccagcagtacacctgttacaccgtgttcttcatcagcatcgagatgtgccagatcgcagatgtcctcatccgcaagacacggcgcctctctgttttccagcagggattcttcaggaacaagatcctggtgatcgccatcgtgttccaggtctgcattggctgcttcctgtgctactgcccagggatgcctaacatcttcaacttcatgcccatccggttccagtggtggctggtccccatgcccttcggccttctcatctttgtctatgatgagatccggaaacttggagttcgctgttgcccagggagctggtgggaccaagatttctac

SEQ ID NO: 1708 - DNA, 617 bp, Mus musculus; identical to SEQ ID NO: 1707

SEQ ID NO: 1709 - DNA, 409 bp, Mus musculus
  misc_feature (104)..(130): n is a, c, g, or t
  misc_feature (207)..(207): n is a, c, g, or t
  misc_feature (209)..(210): n is a, c, g, or t
  misc_feature (217)..(220): n is a, c, g, or t
  misc_feature (223)..(224): n is a, c, g, or t
  misc_feature (226)..(227): n is a, c, g, or t
  misc_feature (229)..(230): n is a, c, g, or t
  misc_feature (289)..(289): n is a, c, g, or t
tttttgggatgtccttgttgacacttgtataataaatatctttatatcattttcagtttttgtcacaagatactgaacatgattaggatgtttttgaaggtttnnnnnnnnnnnnnnnnnnnnnnnnnnntgccaggtttttacagctttgacagggaatagttcttttaaaacatttatttcctatcttacagtttttaatctaancnnttttctnnnnttnntnnannccattcagttggtagataacttcaaccgtacgatttggttgtcatttcacgattatagnacaacattctcttgtcctctcagctccttgtgtgataacaacttagagtgtaatctgttatagttatcacctcccgggtggtaactataacagattacactctgagttgttatagttatc

SEQ ID NO: 1710 - DNA, 409 bp, Mus musculus; identical to SEQ ID NO: 1709
  misc_feature (104)..(130): n is a, c, g, or t
  misc_feature (207)..(207): n is a, c, g, or t
  misc_feature (209)..(210): n is a, c, g, or t
  misc_feature (217)..(220): n is a, c, g, or t
  misc_feature (223)..(224): n is a, c, g, or t
  misc_feature (226)..(227): n is a, c, g, or t
  misc_feature (229)..(230): n is a, c, g, or t
  misc_feature (289)..(289): n is a, c, g, or t

SEQ ID NO: 1711 - DNA, 346 bp, Mus musculus
  misc_feature (34)..(34): n is a, c, g, or t
  misc_feature (146)..(146): n is a, c, g, or t
  misc_feature (155)..(155): n is a, c, g, or t
  misc_feature (164)..(164): n is a, c, g, or t
  misc_feature (194)..(194): n is a, c, g, or t
  misc_feature (209)..(209): n is a, c, g, or t
  misc_feature (216)..(216): n is a, c, g, or t
  misc_feature (221)..(221): n is a, c, g, or t
  misc_feature (234)..(234): n is a, c, g, or t
  misc_feature (243)..(243): n is a, c, g, or t
  misc_feature (248)..(248): n is a, c, g, or t
  misc_feature (253)..(280): n is a, c, g, or t
  misc_feature (282)..(282): n is a, c, g, or t
  misc_feature (284)..(284): n is a, c, g, or t
  misc_feature (315)..(315): n is a, c, g, or t
catggtgcactaccatccttctcaggtggcagcngctgcctcttgcctgtctcagaaggtgctgggccaaggaaaatggaatttgaagcagcagtattacacaggctacatggagagtgaagtcctggaagtcatgcagcacatgnccaagaacnttgtgaaantcaatgacaaccgtaccaagttcatcgctntcaagaacaagtatnccagcancagantcctgaagatcancacgatccntcagntgaannnnnnnnnnnnnnnnnnnnnnnnnnnncntntgctgggcagcccctagacactggactgccntcctgcgcttctcagatcctgtatgtatttt

SEQ ID NO: 1712 - DNA, 346 bp, Mus musculus; identical to SEQ ID NO: 1711
  misc_feature (34)..(34): n is a, c, g, or t
  misc_feature (146)..(146): n is a, c, g, or t
  misc_feature (155)..(155): n is a, c, g, or t
  misc_feature (164)..(164): n is a, c, g, or t
  misc_feature (194)..(194): n is a, c, g, or t
  misc_feature (209)..(209): n is a, c, g, or t
  misc_feature (216)..(216): n is a, c, g, or t
  misc_feature (221)..(221): n is a, c, g, or t
  misc_feature (234)..(234): n is a, c, g, or t
  misc_feature (243)..(243): n is a, c, g, or t
  misc_feature (248)..(248): n is a, c, g, or t
  misc_feature (253)..(280): n is a, c, g, or t
  misc_feature (282)..(282): n is a, c, g, or t
  misc_feature (284)..(284): n is a, c, g, or t
  misc_feature (315)..(315): n is a, c, g, or t

SEQ ID NO: 1713 - DNA, 168 bp, Mus musculus
acacccgctgtgagcgcttgccttgccatgagaaccaggagtgccccaggctgcctctgagaataacctactaccacctctcttttcccaccaacatccaagtgccagcggtggttttccgcatgggcccttccagtgctgtccctggggacagcatgcagctggcca

SEQ ID NO: 1714 - DNA, 168 bp, Mus musculus; identical to SEQ ID NO: 1713

SEQ ID NO: 1715 - DNA, 125 bp, Mus musculus
cgcaactgccaagacattgatgagtgtgtgaccggcatccataactgttccatcaatgagacttgcttcaacatccagggcagcttccgctgtctgtcctttgaatgccccgagaactatcgccg

SEQ ID NO: 1716 - DNA, 125 bp, Mus musculus; identical to SEQ ID NO: 1715

SEQ ID NO: 1717 - DNA, 289 bp, Mus musculus
  misc_feature (51)..(51): n is a, c, g, or t
  misc_feature (53)..(53): n is a, c, g, or t
  misc_feature (70)..(70): n is a, c, g, or t
  misc_feature (80)..(80): n is a, c, g, or t
  misc_feature (113)..(113): n is a, c, g, or t
  misc_feature (141)..(141): n is a, c, g, or t
  misc_feature (145)..(145): n is a, c, g, or t
  misc_feature (204)..(204): n is a, c, g, or t
  misc_feature (207)..(207): n is a, c, g, or t
cgcgatgggtcacagtccgaagaaacaaaggcaccatggatgggtacctgntncgagagaacgtatcccnaaactgggantttctaaggcaacgctaactcagaacactaccnccaagagacaccgcgggtcctggctagncccnactggggacggacagagactttctccgtgtctaattaatatttatgtatttatgtatanccncctaggtgaaggaggggtgtatgtaatatttattctaacttatgcaggggtgcgagatatgcctccctgctgtaacacagat

SEQ ID NO: 1718 - DNA, 289 bp, Mus musculus; identical to SEQ ID NO: 1717
  misc_feature (51)..(51): n is a, c, g, or t
  misc_feature (53)..(53): n is a, c, g, or t
  misc_feature (70)..(70): n is a, c, g, or t
  misc_feature (80)..(80): n is a, c, g, or t
  misc_feature (113)..(113): n is a, c, g, or t
  misc_feature (141)..(141): n is a, c, g, or t
  misc_feature (145)..(145): n is a, c, g, or t
  misc_feature (204)..(204): n is a, c, g, or t
  misc_feature (207)..(207): n is a, c, g, or t

SEQ ID NO: 1719 - DNA, 548 bp, Mus musculus
  misc_feature (40)..(71): n is a, c, g, or t
  misc_feature (236)..(274): n is a, c, g, or t
  misc_feature (329)..(348): n is a, c, g, or t
aaggagagattgctcgctgtaagcagctcatctgcgatcnnnnnnnnnnnnnnnnnnnnnnnnnnnnnnnnggccaggtgatcagagtcatctgtattctcagccaccccatcaaaaacaccaatgacgccaactcctgccagatcattattccacagaaccaagtcaaccggaagtcagatatctacgtctgcatgatctcctctgcacacaatgtggccgcacaaggcaagtannnnnnnnnnnnnnnnnnnnnnnnnnnnnnnnnnnnnnncgagaaggaaatcagaccagccctggagcttttggaaccaattgagcagaaattnnnnnnnnnnnnnnnnnnnnttgtaccaaaagacttgggaacagaaagccagatctttatatcccgtacctatgatgcaacaactcactttgagacgacctgtgatgacattaaggacatctataagaggatgatgggatccgagtttgactttgaggaaatgaagcgcaagaaaaatgacatctatggggaagagtaacagcagtacatgttatcatct

SEQ ID NO: 1720 - DNA, 548 bp, Mus musculus; identical to SEQ ID NO: 1719
  misc_feature (40)..(71): n is a, c, g, or t
  misc_feature (236)..(274): n is a, c, g, or t
  misc_feature (329)..(348): n is a, c, g, or t

SEQ ID NO: 1721 - DNA, 579 bp, Mus musculus
  misc_feature (328)..(328): n is a, c, g, or t
  misc_feature (337)..(338): n is a, c, g, or t
  misc_feature (344)..(344): n is a, c, g, or t
  misc_feature (348)..(348): n is a, c, g, or t
  misc_feature (350)..(350): n is a, c, g, or t
  misc_feature (358)..(358): n is a, c, g, or t
  misc_feature (382)..(382): n is a, c, g, or t
  misc_feature (396)..(396): n is a, c, g, or t
  misc_feature (409)..(409): n is a, c, g, or t
  misc_feature (411)..(411): n is a, c, g, or t
  misc_feature (413)..(413): n is a, c, g, or t
  misc_feature (415)..(415): n is a, c, g, or t
  misc_feature (419)..(419): n is a, c, g, or t
  misc_feature (421)..(421): n is a, c, g, or t
  misc_feature (428)..(428): n is a, c, g, or t
  misc_feature (450)..(450): n is a, c, g, or t
  misc_feature (461)..(461): n is a, c, g, or t
  misc_feature (504)..(504): n is a, c, g, or t
  misc_feature (542)..(542): n is a, c, g, or t
atgtaattcccttgcctggtccctctgactttatcgaccctgggaagatgtgctggacagctggctgggggaaaactggagagaaagaacctacctcagaaaccctgagagaggttgaactgagaatcatggataaagaggcctgtaaaatgtataagcattatgactataacttccaggtctgtgtgggaagttccacaaagttaaaaacagcatacatgggagactctgggggacctcttctgtgtgctggtgtggcccatggtattgtatcttatggggattcacatggaaagccccctgcagtcttcaccagaatctctgcatntgtgccctnnattaanacantnataaatgncaagtagctgagaagtctgaccancctgagacagattntccaagccagagntntntngtantntttgtgntcaacaaagcttgtccccagantatccccagtntgcccccagcctcaccccagcctatgtgcagcctgcctttagnttgcccccattctgtccccagctgtccctttgaggatntcaaagatacaggagtctgtgatgatggtttgttccc

SEQ ID NO: 1722 - DNA, 579 bp, Mus musculus; identical to SEQ ID NO: 1721
  misc_feature (328)..(328): n is a, c, g, or t
  misc_feature (337)..(338): n is a, c, g, or t
  misc_feature (344)..(344): n is a, c, g, or t
  misc_feature (348)..(348): n is a, c, g, or t
  misc_feature (350)..(350): n is a, c, g, or t
  misc_feature (358)..(358): n is a, c, g, or t
  misc_feature (382)..(382): n is a, c, g, or t
  misc_feature (396)..(396): n is a, c, g, or t
  misc_feature (409)..(409): n is a, c, g, or t
  misc_feature (411)..(411): n is a, c, g, or t
  misc_feature (413)..(413): n is a, c, g, or t
  misc_feature (415)..(415): n is a, c, g, or t
  misc_feature (419)..(419): n is a, c, g, or t
  misc_feature (421)..(421): n is a, c, g, or t
  misc_feature (428)..(428): n is a, c, g, or t
  misc_feature (450)..(450): n is a, c, g, or t
  misc_feature (461)..(461): n is a, c, g, or t
  misc_feature (504)..(504): n is a, c, g, or t
  misc_feature (542)..(542): n is a, c, g, or t

SEQ ID NO: 1723 - DNA, 470 bp, Mus musculus
  misc_feature (297)..(297): n is a, c, g, or t
  misc_feature (306)..(307): n is a, c, g, or t
  misc_feature (313)..(313): n is a, c, g, or t
  misc_feature (317)..(317): n is a, c, g, or t
  misc_feature (319)..(319): n is a, c, g, or t
  misc_feature (327)..(327): n is a, c, g, or t
  misc_feature (351)..(351): n is a, c, g, or t
  misc_feature (365)..(365): n is a, c, g, or t
  misc_feature (378)..(378): n is a, c, g, or t
  misc_feature (380)..(380): n is a, c, g, or t
  misc_feature (382)..(382): n is a, c, g, or t
  misc_feature (384)..(384): n is a, c, g, or t
  misc_feature (388)..(388): n is a, c, g, or t
  misc_feature (390)..(390): n is a, c, g, or t
  misc_feature (397)..(397): n is a, c, g, or t
  misc_feature (419)..(419): n is a, c, g, or t
  misc_feature (430)..(430): n is a, c, g, or t
tatcgaccctgggaagatgtgctggacagctggctgggggaaaactggagagaaagaacctacctcagaaaccctgagagaggttgaactgagaatcatggataaagaggcctgtaaaatgtataagcattatgactataacttccaggtctgtgtgggaagttccacaaagttaaaaacagcatacatgggagactctgggggacctcttctgtgtgctggtgtggcccatggtattgtatcttatggggattcacatggaaagccccctgcagtcttcaccagaatctctgcatntgtgccctnnattaanacantnataaatgncaagtagctgagaagtctgaccancctgagacagattntccaagccagagntntntngtantntttgtgntcaacaaagcttgtccccagantatccccagtntgcccccagcctcaccccagcctatgtgcagcctgccttt

SEQ ID NO: 1724 - DNA, 470 bp, Mus musculus; identical to SEQ ID NO: 1723
  misc_feature (297)..(297): n is a, c, g, or t
  misc_feature (306)..(307): n is a, c, g, or t
  misc_feature (313)..(313): n is a, c, g, or t
  misc_feature (317)..(317): n is a, c, g, or t
  misc_feature (319)..(319): n is a, c, g, or t
  misc_feature (327)..(327): n is a, c, g, or t
  misc_feature (351)..(351): n is a, c, g, or t
  misc_feature (365)..(365): n is a, c, g, or t
  misc_feature (378)..(378): n is a, c, g, or t
  misc_feature (380)..(380): n is a, c, g, or t
  misc_feature (382)..(382): n is a, c, g, or t
  misc_feature (384)..(384): n is a, c, g, or t
  misc_feature (388)..(388): n is a, c, g, or t
  misc_feature (390)..(390): n is a, c, g, or t
  misc_feature (397)..(397): n is a, c, g, or t
  misc_feature (419)..(419): n is a, c, g, or t
  misc_feature (430)..(430): n is a, c, g, or t

SEQ ID NO: 1725 - DNA, 313 bp, Mus musculus
ccgccagatcaacctggagttgtatgcctcctacgtctatctgtctatgtcttgttattttgaccgagatgatgtggctctgaagaactttgccaaatactttctccaccaatctcatgaggagagggagcatgccgagaaactgatgaagctgcagaaccagcgaggtggccgaatcttcctgcaggatataaagaaaccagaccgtgatgactgggagagcgggctgaatgcaatggagtgtgcactgcacttggaaaagagtgtgaatcagtcactactggaactgcacaaactggctactgacaagaat

SEQ ID NO: 1726 - DNA, 313 bp, Mus musculus; identical to SEQ ID NO: 1725

SEQ ID NO: 1727 - DNA, 551 bp, Mus musculus
  misc_feature (73)..(73): n is a, c, g, or t
  misc_feature (77)..(78): n is a, c, g, or t
  misc_feature (80)..(80): n is a, c, g, or t
  misc_feature (82)..(90): n is a, c, g, or t
  misc_feature (92)..(93): n is a, c, g, or t
  misc_feature (354)..(356): n is a, c, g, or t
  misc_feature (411)..(432): n is a, c, g, or t
  misc_feature (453)..(469): n is a, c, g, or t
acttactccacacacgagttagaagtatgagttggctggtcaacttgaacactgttactgatgggtgggtggntggnngntnnnnnnnnntnnttttttggtgggattagcatgtcactaaagcgggccttttgatatattaagttttttaaaagcaaaacaagtttagattttaatcagatttgtagggtttctaactttacagaattgcctgtttgtttcaatgtctccctccacttggctcttaggggaattaaggacaggcctagagttaaaacacttgtctcctagtgtcacctctgccagcagactgttactttccttctgaaaaagccaatagtctttttttttttnnncttttatagtaaacacacccccacctccatcccagcctgttgcccttcagttttnnnnnnnnnnnnnnnnnnnnnnggccaactgtggtttctctcnnnnnnnnnnnnnnnnnaattgccatgtatagtatgttcggttagataactcactgtaaacagactgtaactgccaggcagcgcttataaatcaaccta

SEQ ID NO: 1728 - DNA, 551 bp, Mus musculus; identical to SEQ ID NO: 1727
  misc_feature (73)..(73): n is a, c, g, or t
  misc_feature (77)..(78): n is a, c, g, or t
  misc_feature (80)..(80): n is a, c, g, or t
  misc_feature (82)..(90): n is a, c, g, or t
  misc_feature (92)..(93): n is a, c, g, or t
  misc_feature (354)..(356): n is a, c, g, or t
  misc_feature (411)..(432): n is a, c, g, or t
  misc_feature (453)..(469): n is a, c, g, or t

SEQ ID NO: 1729 - DNA, 440 bp, Mus musculus
  misc_feature (78)..(113): n is a, c, g, or t
  misc_feature (366)..(366): n is a, c, g, or t
  misc_feature (382)..(382): n is a, c, g, or t
tgctggacatggtgcagtattacttgaacttgacagaagccaatctaaaaggagaatccaactggacattggagtatnnnnnnnnnnnnnnnnnnnnnnnnnnnnnnnnnnnnccaaagagtttatatgccttagttcagcaatttgccaccaaagacagcaagcagttcctgaaatactaccattattattttgtgagttatgacagcagtgcaacttgtgaccagcattgtaagaccttacaggtctgtgcaattatgaatcttgatagcatgtcctatgatgattgccttaaacagcatttataaagcacagtcactagtattccagttgtgtttgtagaaaaaaaaaatcacatcatggtgntcctgcgatcagcttntgaagtgctgggagcataggaagattgacattctgtgtgacttgtgaggctcagatgc

SEQ ID NO: 1730 - DNA, 440 bp, Mus musculus; identical to SEQ ID NO: 1729
  misc_feature (78)..(113): n is a, c, g, or t
  misc_feature (366)..(366): n is a, c, g, or t
  misc_feature (382)..(382): n is a, c, g, or t

SEQ ID NO: 1731 - DNA, 448 bp, Mus musculus
  misc_feature (31)..(31): n is a, c, g, or t
  misc_feature (40)..(55): n is a, c, g, or t
  misc_feature (184)..(201): n is a, c, g, or t
  misc_feature (228)..(233): n is a, c, g, or t
  misc_feature (248)..(248): n is a, c, g, or t
cttccccttctgcaggtcggcaggaggcatntctaggcannnnnnnnnnnnnnnngtggactggaagggaatgtatatgcagggtacactaagtgggattccctggtcttaccttaggcagctccagtggcaaccccctgcattgtgggtctagggtgggtccttggtggtgagacaggcctcnnnnnnnnnnnnnnnnnntgtggtggtgggggtgggcttatctgnnnnnnggaccccagttgggnttctcagtgacttctcccatttcttagtagcagttgtacaaggagccaggccaagatggtgtcttgggggctaagggagctcacaggacactgagcaatggctgatcctttctcagtgttgaataccgtgggtgtcaaagcacttagtgggtctgactccagccccaaacatccctgtttctgtaacatcctggtctgga

SEQ ID NO: 1732 - DNA, 448 bp, Mus musculus; identical to SEQ ID NO: 1731
  misc_feature (31)..(31): n is a, c, g, or t
  misc_feature (40)..(55): n is a, c, g, or t
  misc_feature (184)..(201): n is a, c, g, or t
  misc_feature (228)..(233): n is a, c, g, or t
  misc_feature (248)..(248): n is a, c, g, or t

SEQ ID NO: 1733 - DNA, 103 bp, Mus musculus
ctgcttcccacgacgtttccatagagaccgtgtggttttgttcgcctgtcccccttccttcccttgcccatttataggcacagatacactgtctgacaccgct

SEQ ID NO: 1734 - DNA, 103 bp, Mus musculus; identical to SEQ ID NO: 1733

SEQ ID NO: 1735 - DNA, 167 bp, Mus musculus
  misc_feature (129)..(129): n is a, c, g, or t
agagccaagattagcctcgcctctgaggaagcgccctacaggccgttgcttcgctggacttttctctagatgctgtctgccattactccaaagtgacttctataaaatcaaacctctcctcgcacaggngggagagccaataatgagacttgttggtgagcccgcct

SEQ ID NO: 1736 - DNA, 167 bp, Mus musculus; identical to SEQ ID NO: 1735
  misc_feature (129)..(129): n is a, c, g, or t

SEQ ID NO: 1737 - DNA, 156 bp, Mus musculus
  misc_feature (30)..(30): n is a, c, g, or t
  misc_feature (34)..(34): n is a, c, g, or t
  misc_feature (39)..(39): n is a, c, g, or t
  misc_feature (43)..(43): n is a, c, g, or t
  misc_feature (51)..(51): n is a, c, g, or t
  misc_feature (55)..(55): n is a, c, g, or t
  misc_feature (57)..(58): n is a, c, g, or t
  misc_feature (61)..(61): n is a, c, g, or t
  misc_feature (63)..(90): n is a, c, g, or t
caccccaaaacagatccggaataagatcantgtntatangcgnttttaccnaacngnntgncnnnnnnnnnnnnnnnnnnnnnnnnnnnngaagatggaggtagactgagtggggcacacccccagacctaggtctgctggaacaacgaaaccaaa

SEQ ID NO: 1738 - DNA, 156 bp, Mus musculus; identical to SEQ ID NO: 1737
  misc_feature (30)..(30): n is a, c, g, or t
  misc_feature (34)..(34): n is a, c, g, or t
  misc_feature (39)..(39): n is a, c, g, or t
  misc_feature (43)..(43): n is a, c, g, or t
  misc_feature (51)..(51): n is a, c, g, or t
  misc_feature (55)..(55): n is a, c, g, or t
  misc_feature (57)..(58): n is a, c, g, or t
  misc_feature (61)..(61): n is a, c, g, or t
  misc_feature (63)..(90): n is a, c, g, or t

SEQ ID NO: 1739 - DNA, 107 bp, Mus musculus
  misc_feature (61)..(61): n is a, c, g, or t
  misc_feature (76)..(76): n is a, c, g, or t
ctttcaaggccatggtttgtgttctgttgggagcttacagaaagccggggcctgctgtttnttttcagagggatgntctgtttcagcttgttctgtacatgataaag

SEQ ID NO: 1740 - DNA, 107 bp, Mus musculus; identical to SEQ ID NO: 1739
  misc_feature (61)..(61): n is a, c, g, or t
  misc_feature (76)..(76): n is a, c, g, or t

SEQ ID NO: 1741 - DNA, 183 bp, Mus musculus
agattggtaacctaatttgtggcctcctgacttaataaggaaacatgtacagccattatacagcctaaagctgtcagcagaatgactcaacattgccttcacttcttaataattaaaaacctatgaaagttggtgtaatttgttcatatagttatttaccttcaggtctatatgataatctga

SEQ ID NO: 1742 - DNA, 183 bp, Mus musculus; identical to SEQ ID NO: 1741

SEQ ID NO: 1743 - DNA, 523 bp, Mus musculus
  misc_feature (67)..(81): n is a, c, g, or t
  misc_feature (170)..(170): n is a, c, g, or t
  misc_feature (325)..(327): n is a, c, g, or t
  misc_feature (425)..(455): n is a, c, g, or t
  misc_feature (459)..(459): n is a, c, g, or t
  misc_feature (461)..(461): n is a, c, g, or t
cccacaaagggacgagcagcttcaaacctgtcctccctgtgcttggtggcttgctcacaggtgcgcnnnnnnnnnnnnnnnatttcctatcctcagaacttcccatcttctgcccccatccttagtccctttgcttttgtagggagagggatagtgtcaggggctgggcnagcagcttgggggccacagggagaagttggataatgtgcctgttttttaactcgataaaaaagcctacctccaaaattccctttttgttcttcctgaacctgggcattcagcctcctgtccttaactaaattaggagcctctgcctcctgcctgnnntgtatcctggctcccaggacacaggatggtcccctttccttgcacgctagctagtagctggtaaggtcttcacaccctgagttttctgtttcctgctnnnnnnnnnnnnnnnnnnnnnnnnnnnnnnngtcntntgcagtactctagagagtgggcttcccccttggctgtgggcaggccctaactgttttctgca

SEQ ID NO: 1744 - DNA, 523 bp, Mus musculus; identical to SEQ ID NO: 1743
  misc_feature (67)..(81): n is a, c, g, or t
  misc_feature (170)..(170): n is a, c, g, or t
  misc_feature (325)..(327): n is a, c, g, or t
  misc_feature (425)..(455): n is a, c, g, or t
  misc_feature (459)..(459): n is a, c, g, or t
  misc_feature (461)..(461): n is a, c, g, or t

SEQ ID NO: 1745 - DNA, 321 bp, Mus musculus
gagacgtccccaaaggacagtggcagggctgtgcaaatgttttatacaggtacagaattgactcaccatttttttttcattaaaagtggtatattagggtactggatatgacgtcatcttgcagactaacctgcatcctagccaacagcaagggctgtgccccagtaggaatcccgttctttcctgaggttaggtttggaggatcaacatgtttcctccgccataatggactctggcttgtgtaggcttcttgctgctccgtagcattccgggcgaggcgtaaggaggcagtggtggtcagccagggattctggctgtgct

SEQ ID NO: 1746 - DNA, 321 bp, Mus musculus; identical to SEQ ID NO: 1745

SEQ ID NO: 1747 - DNA, 391 bp, Mus musculus
  misc_feature (48)..(48): n is a, c, g, or t
  misc_feature (105)..(105): n is a, c, g, or t
  misc_feature (143)..(143): n is a, c, g, or t
  misc_feature (148)..(148): n is a, c, g, or t
  misc_feature (153)..(153): n is a, c, g, or t
  misc_feature (168)..(168): n is a, c, g, or t
  misc_feature (201)..(201): n is a, c, g, or t
  misc_feature (230)..(230): n is a, c, g, or t
  misc_feature (233)..(233): n is a, c, g, or t
  misc_feature (250)..(287): n is a, c, g, or t
  misc_feature (291)..(294): n is a, c, g, or t
  misc_feature (296)..(296): n is a, c, g, or t
  misc_feature (298)..(298): n is a, c, g, or t
  misc_feature (329)..(362): n is a, c, g, or t
agttcctatgttgtagtgacatggcctttggggacagtacatgatttntcataatttgaattcatagtagatatagttaagggaacagcagtcaggttatgaatnttttcccatttttctttttaagtaaatttatttttttnaattntgatntaattttgtcattcntcataagggatttaattcatgaagttgtgtgtntcttatttcaaacacagctgccagatganctnatttatgattgttagannnnnnnnnnnnnnnnnnnnnnnnnnnnnnnnnnnnnnattnnnncngntgtagagagcagaggctgcagaatctctgannnnnnnnnnnnnnnnnnnnnnnnnnnnnnnnnnggacagtcaggctacatagagagaccatg

SEQ ID NO: 1748 - DNA, 391 bp, Mus musculus; identical to SEQ ID NO: 1747
  misc_feature (48)..(48): n is a, c, g, or t
  misc_feature (105)..(105): n is a, c, g, or t
  misc_feature (143)..(143): n is a, c, g, or t
  misc_feature (148)..(148): n is a, c, g, or t
  misc_feature (153)..(153): n is a, c, g, or t
  misc_feature (168)..(168): n is a, c, g, or t
  misc_feature (201)..(201): n is a, c, g, or t
  misc_feature (230)..(230): n is a, c, g, or t
  misc_feature (233)..(233): n is a, c, g, or t
  misc_feature (250)..(287): n is a, c, g, or t
  misc_feature (291)..(294): n is a, c, g, or t
  misc_feature (296)..(296): n is a, c, g, or t
  misc_feature (298)..(298): n is a, c, g, or t
  misc_feature (329)..(362): n is a, c, g, or t

SEQ ID NO: 1749 - DNA, 272 bp, Mus musculus
  misc_feature (193)..(207): n is a, c, g, or t
  misc_feature (212)..(212): n is a, c, g, or t
ggattctcccatcagccatttggtcttactcttaaggccagttgaagatggtcccttacggtttcccaagttaggttagtgatgtgagatgccctgtccctacctctttcccgagccccatccctgcagaaggcaattgctgggtttccaattcttttccaagttcgttttgtttatcctgcttctcaacccnnnnnnnnnnnnnnnggggncttatactcccaaaccctgagtgtccagcctttcccctgttgaattcttagtctcttgtg

SEQ ID NO: 1750 - DNA, 272 bp, Mus musculus; identical to SEQ ID NO: 1749
  misc_feature (193)..(207): n is a, c, g, or t
  misc_feature (212)..(212): n is a, c, g, or t

SEQ ID NO: 1751 - DNA, 534 bp, Mus musculus
  misc_feature (96)..(110): n is a, c, g, or t
  misc_feature (130)..(130): n is a, c, g, or t
  misc_feature (184)..(184): n is a, c, g, or t
  misc_feature (190)..(241): n is a, c, g, or t
  misc_feature (396)..(396): n is a, c, g, or t
  misc_feature (452)..(452): n is a, c, g, or t
  misc_feature (454)..(454): n is a, c, g, or t
  misc_feature (457)..(458): n is a, c, g, or t
  misc_feature (473)..(473): n is a, c, g, or t
  misc_feature (475)..(477): n is a, c, g, or t
  misc_feature (479)..(480): n is a, c, g, or t
  misc_feature (483)..(490): n is a, c, g, or t
gcatccgtatcacctcaccagtatgtctcaggctgaatttgacaaagccgctgaggaggtgaagcgcctcaagactcagccaactgatgaagagannnnnnnnnnnnnnngtcacttcaaacaagctacngtgggcgatgtaaatacagatcggccggggctcttggacctcaagggcaaagcnaagtgnnnnnnnnnnnnnnnnnnnnnnnnnnnnnnnnnnnnnnnnnnnnnnnnnnnntatgtggaaaaggtagacgagctaaagaagaaatacggaatataaatcaccagatttggtggccagccacacgtgtgacctgtgaggacataatgccttggttttttctaatgtagatgatatggctgtgatacattagggccagcgttaacctntgctcctcctccctctgtagtttttacctacaatcaattaaaagtacatttgttantntgnnaaaaaaaaaaaaaanannnannaannnnnnnnggggggtgtggtgttaaaaaaagcgcccaacgaaattgttgtct

SEQ ID NO: 1752 - DNA, 534 bp, Mus musculus; identical to SEQ ID NO: 1751
  misc_feature (96)..(110): n is a, c, g, or t
  misc_feature (130)..(130): n is a, c, g, or t
  misc_feature (184)..(184): n is a, c, g, or t
  misc_feature (190)..(241): n is a, c, g, or t
  misc_feature (396)..(396): n is a, c, g, or t
  misc_feature (452)..(452): n is a, c, g, or t
  misc_feature (454)..(454): n is a, c, g, or t
  misc_feature (457)..(458): n is a, c, g, or t
  misc_feature (473)..(473): n is a, c, g, or t
  misc_feature (475)..(477): n is a, c, g, or t
  misc_feature (479)..(480): n is a, c, g, or t
  misc_feature (483)..(490): n is a, c, g, or t

SEQ ID NO: 1753 - DNA, 227 bp, Mus musculus
  misc_feature (50)..(90): n is a, c, g, or t
tggaggccttggtgaccaacacttaccagggacctgtgaatggtggctgnnnnnnnnnnnnnnnnnnnnnnnnnnnnnnnnnnnnnnnnnggagacagctcaggatgccccccaggtatgccctccccactctccaacagatgacttgaatgacaaccctaatggccaggccctgcaggtccctagcactattttttcgtggaccctagagctctggatggtggctg

SEQ ID NO: 1754 - DNA, 227 bp, Mus musculus; identical to SEQ ID NO: 1753
  misc_feature (50)..(90): n is a, c, g, or t

SEQ ID NO: 1755 - DNA, 188 bp, Mus musculus
  misc_feature (97)..(131): n is a, c, g, or t
aggaagtccaccagggtctcgagagcatggggttggccgctctgagcagcgagaatacggcgtccctggtgggccagctccagaacattgccaagannnnnnnnnnnnnnnnnnnnnnnnnnnnnnnnnnnatacacttgttcctcaagtgctgctttgtcctgggtgtgcagcgatccctcttggac

SEQ ID NO: 1756 - DNA, 188 bp, Mus musculus; identical to SEQ ID NO: 1755
  misc_feature (97)..(131): n is a, c, g, or t

SEQ ID NO: 1757 - DNA, 377 bp, Mus musculus
  misc_feature (66)..(66): n is a, c, g, or t
  misc_feature (244)..(263): n is a, c, g, or t
ctctagcacgtctcagctgaatgagctgatgatggcttcccagacgacattgctggctcaggagcnacgggaaagaactgcaggtgacattgagctcacggggacattcgtcatcaatctagaaggtggtgacattcgtgaggagtcttcatataaagtcattgtggtaccgactgccagagagaagtgccctcgatgttggaagcatacctctgagactgcagacgctctctgtcctcggtgnnnnnnnnnnnnnnnnnnnnagtagcaacctgatgtcaacagacgacgacactccccacagtactgactggctgaggagatgagctgttagacagttccctagaaagaaatccaaggcttacacagaaagtaga

SEQ ID NO: 1758 - DNA, 377 bp, Mus musculus; identical to SEQ ID NO: 1757
  misc_feature (66)..(66): n is a, c, g, or t
  misc_feature (244)..(263): n is a, c, g, or t

SEQ ID NO: 1759 - DNA, 496 bp, Mus musculus
  misc_feature (389)..(389): n is a, c, g, or t
gatttctgccttaaagggctttctttttagaaatagtttcttttattgcccttagaagatcacccccaggaagagtatgagctatcttttctacatttcttttcctaggaatattcttatccatttcttatatacatttcttttgggagggagtttttatgctatagttgctggtatttatgtaaagggaccattactaagtgtatttctctagcatattatgtttaagggactgttcaaggtaggttactgaactgccgggctgatgttagagacactggccagaaaagctataataagttcttaaattataatttgatcactatacatttgttctatgctgccttatgttcataagaatatcaacagacagctagagccagaaaaanatagtcacattttgttaaaaagttgaattatgactggagtgaaccgtgcattcccttgccttttactttttttctgtgacatttacgtctcatgtaatttgcatcgc

SEQ ID NO: 1760 - DNA, 496 bp, Mus musculus; identical to SEQ ID NO: 1759
  misc_feature (389)..(389): n is a, c, g, or t

SEQ ID NO: 1761 - DNA, 583 bp, Mus musculus
  misc_feature (94)..(94): n is a, c, g, or t
  misc_feature (174)..(192): n is a, c, g, or t
  misc_feature (198)..(199): n is a, c, g, or t
  misc_feature (257)..(257): n is a, c, g, or t
  misc_feature (290)..(290): n is a, c, g, or t
  misc_feature (307)..(307): n is a, c, g, or t
  misc_feature (309)..(309): n is a, c, g, or t
  misc_feature (327)..(327): n is a, c, g, or t
  misc_feature (332)..(332): n is a, c, g, or t
  misc_feature (360)..(360): n is a, c, g, or t
  misc_feature (406)..(406): n is a, c, g, or t
  misc_feature (444)..(444): n is a, c, g, or t
  misc_feature (497)..(497): n is a, c, g, or t
  misc_feature (506)..(506): n is a, c, g, or t
aatggcatatcacgaaaggtgggactgttgcagccaagtggaccattgacctgaagagcggctcaggggaggtgtaccaaggccccgcaaaggnctctgctgatgtgaccatcatcatttccgatgaggattttatggaagtggtcttcggcaagcttgacccacagaaggccnnnnnnnnnnnnnnnnnnnaaggcnnagagggaacatcatgctgagccagaaactacagatgattcttaaagactatgccaagntctgaagggacccactgtgtgctgttaaaggantcaataattaaatactntntacccagctgagccgcanccttntgcgatccacaggagtgtgcagcagaantcgcttcacatttccagattcagataacttgcatattttcattttntactaatttttcacatatttttacaaggaactgtaatntaggtagcaaaataatcattctgttcatagatctgtatcttaataaaaaaaantcaaccaantctggtttctttagactttgtaaaagcattagtatgtgaaaggaaaacggaatgaataaaagccactttaccgcttg

SEQ ID NO: 1762 - DNA, 583 bp, Mus musculus; identical to SEQ ID NO: 1761
  misc_feature (94)..(94): n is a, c, g, or t
  misc_feature (174)..(192): n is a, c, g, or t
  misc_feature (198)..(199): n is a, c, g, or t
  misc_feature (257)..(257): n is a, c, g, or t
  misc_feature (290)..(290): n is a, c, g, or t
  misc_feature (307)..(307): n is a, c, g, or t
  misc_feature (309)..(309): n is a, c, g, or t
  misc_feature (327)..(327): n is a, c, g, or t
  misc_feature (332)..(332): n is a, c, g, or t
  misc_feature (360)..(360): n is a, c, g, or t
  misc_feature (406)..(406): n is a, c, g, or t
  misc_feature (444)..(444): n is a, c, g, or t
  misc_feature (497)..(497): n is a, c, g, or t
  misc_feature (506)..(506): n is a, c, g, or t

SEQ ID NO: 1763 - DNA, 404 bp, Mus musculus
tcgccccgcacggtggcccgggcggtggggacggcgccgtgggcgggggtcccggctacccgcggccccagagcgccccgcacctgccggccccgaacccgcacgcggcccgccagccccccgcttactacgcgccgcgggcgcgcgagcccagctaccccgggggcctgtaccccgcgcccgccgccgcctgtccctacgcctgccgcggggccagccccgcgcgacccgagcagtccccggcccccggcgcgcaccccagcccggccccgcagccccccgtgccccttgggcactgcgctcccggccccaccaccccggctgtcgcgacggggggcagcgcccccgcgtgcccgctgctgctggcggaccagggcccggcgggcccgaagggcaaggagccg

SEQ ID NO: 1764 - DNA, 404 bp, Mus musculus; identical to SEQ ID NO: 1763

SEQ ID NO: 1765 - DNA, 333 bp, Mus musculus
  misc_feature (159)..(159): n is a, c, g, or t
cacccagctcattcctgtcagtgaagccatacctcacgagagctttgacaatgaaacactggtcaatgacatcatgctcctgaagctggaacgcaaagctcaactcaacagtgctgtggatactattgcccttccaaagagcaaggattgggtgaaacntgggcaggtgtgcacagtggcaggttggggaaagttggccaattgcactttgtctgacacacttcaagaagtgaatctagaagttcaaaagggccagaagtgtcgcagcatgtcccaaacctacaacgactccatccagctctgtgtgggaaatcccagtgagaataaggctac

SEQ ID NO: 1766 - DNA, 333 bp, Mus musculus; identical to SEQ ID NO: 1765
  misc_feature (159)..(159): n is a, c, g, or t

SEQ ID NO: 1767 - DNA, 505 bp, Mus musculus
  misc_feature (43)..(90): n is a, c, g, or t
  misc_feature (154)..(154): n is a, c, g, or t
  misc_feature (174)..(175): n is a, c, g, or t
  misc_feature (179)..(179): n is a, c, g, or t
  misc_feature (182)..(196): n is a, c, g, or t
  misc_feature (227)..(227): n is a, c, g, or t
  misc_feature (232)..(232): n is a, c, g, or t
  misc_feature (235)..(235): n is a, c, g, or t
  misc_feature (242)..(242): n is a, c, g, or t
  misc_feature (294)..(294): n is a, c, g, or t
  misc_feature (297)..(297): n is a, c, g, or t
  misc_feature (308)..(308): n is a, c, g, or t
  misc_feature (314)..(314): n is a, c, g, or t
  misc_feature (324)..(325): n is a, c, g, or t
  misc_feature (335)..(335): n is a, c, g, or t
  misc_feature (345)..(345): n is a, c, g, or t
  misc_feature (412)..(431): n is a, c, g, or t
gatgcatccaacttagtggcctgggagacaagcccctcagtgnnnnnnnnnnnnnnnnnnnnnnnnnnnnnnnnnnnnnnnnnnnnnnnngagaattagaagtagcctcgtccacttcccacagattgcttctagcatgggctgtgtgtaaacntggcagaaaagcgacgggtnntgcnggnnnnnnnnnnnnnnntggactagcacccagcactgagaaccacggnaaggngcntgcggancctgctgaggaaacacagcgtgcttttattgatttacttctgaacactacanttnctggatggggnggaggngcgagttaanntcggtttccntagaaatcantcaaggccggcctgtgtccttgatgccagggtcgggtctgtgactgccatggtcgctgcttgccaannnnnnnnnnnnnnnnnnnnttgtccgtgggttccagctgtgggtccttcccgtgaaggcctctggaagtgactgctcggttcctaagcaataa

SEQ ID NO: 1768 - DNA, 505 bp, Mus musculus; identical to SEQ ID NO: 1767
  misc_feature (43)..(90): n is a, c, g, or t
  misc_feature (154)..(154): n is a, c, g, or t
  misc_feature (174)..(175): n is a, c, g, or t
  misc_feature (179)..(179): n is a, c, g, or t
  misc_feature (182)..(196): n is a, c, g, or t
  misc_feature (227)..(227): n is a, c, g, or t
  misc_feature (232)..(232): n is a, c, g, or t
  misc_feature (235)..(235): n is a, c, g, or t
  misc_feature (242)..(242): n is a, c, g, or t
  misc_feature (294)..(294): n is a, c, g, or t
  misc_feature (297)..(297): n is a, c, g, or t
  misc_feature (308)..(308): n is a, c, g, or t
  misc_feature (314)..(314): n is a, c, g, or t
  misc_feature (324)..(325): n is a, c, g, or t
  misc_feature (335)..(335): n is a, c, g, or t
  misc_feature (345)..(345): n is a, c, g, or t
  misc_feature (412)..(431): n is a, c, g, or t

SEQ ID NO: 1769 - DNA, 563 bp, Mus musculus
  misc_feature (79)..(79): n is a, c, g, or t
  misc_feature (328)..(328): n is a, c, g, or t
  misc_feature (331)..(331): n is a, c, g, or t
  misc_feature (340)..(340): n is a, c, g, or t
  misc_feature (385)..(385): n is a, c, g, or t
  misc_feature (406)..(422): n is a, c, g, or t
  misc_feature (433)..(433): n is a, c, g, or t
  misc_feature (439)..(439): n is a, c, g, or t
  misc_feature (535)..(535): n is a, c, g, or t
  misc_feature (537)..(537): n is a, c, g, or t
ttgacaacctttgtctctccctgtgttctgtcccgtaccctccagacttccccactttctttctttctttcttttttgntttttaaatcagtggggggtaggaggctgcatgagcccaagctaggactctgcagccttggagcctcagctccagggttctccagggacagcaaccatcagactgagccagcgctggacgggcccaccctgcccctcttctgcatttgcagttccggcatggacaatggactggggagtttgggggtgggagagagtcttaaagagtttggtgagacctccacacctgcagcctgcagcaaggtggatnttnggggggccntttccttcccagatgggcttgctacctggaccccccacattgaantggagggagacaagggtgctnnnnnnnnnnnnnnnnncagtggccctntccctnttccctgcccctgcaggaaggagctgcctggacccgttcgtgggggaggggcagagtgtttttttatatatgtgtgtatatattttttttttaagntntgagctgtcaacgagacgtttcctac

SEQ ID NO: 1770 - DNA, 563 bp, Mus musculus; identical to SEQ ID NO: 1769
  misc_feature (79)..(79): n is a, c, g, or t
  misc_feature (328)..(328): n is a, c, g, or t
  misc_feature (331)..(331): n is a, c, g, or t
  misc_feature (340)..(340): n is a, c, g, or t
  misc_feature (385)..(385): n is a, c, g, or t
  misc_feature (406)..(422): n is a, c, g, or t
  misc_feature (433)..(433): n is a, c, g, or t
  misc_feature (439)..(439): n is a, c, g, or t
  misc_feature (535)..(535): n is a, c, g, or t
  misc_feature (537)..(537): n is a, c, g, or t

SEQ ID NO: 1771 - DNA, 501 bp, Mus musculus
  misc_feature (28)..(28): n is a, c, g, or t
  misc_feature (72)..(72): n is a, c, g, or t
  misc_feature (96)..(96): n is a, c, g, or t
  misc_feature (123)..(123): n is a, c, g, or t
  misc_feature (130)..(182): n is a, c, g, or t
  misc_feature (184)..(185): n is a, c, g, or t
  misc_feature (188)..(188): n is a, c, g, or t
  misc_feature (190)..(191): n is a, c, g, or t
  misc_feature (193)..(193): n is a, c, g, or t
  misc_feature (201)..(201): n is a, c, g, or t
  misc_feature (208)..(208): n is a, c, g, or t
  misc_feature (215)..(215): n is a, c, g, or t
  misc_feature (243)..(243): n is a, c, g, or t
  misc_feature (254)..(254): n is a, c, g, or t
  misc_feature (256)..(256): n is a, c, g, or t
  misc_feature (264)..(264): n is a, c, g, or t
  misc_feature (266)..(266): n is a, c, g, or t
  misc_feature (353)..(368): n is a, c, g, or t
  misc_feature (379)..(379): n is a, c, g, or t
  misc_feature (381)..(381): n is a, c, g, or t
  misc_feature (414)..(414): n is a, c, g, or t
  misc_feature (461)..(462): n is a, c, g, or t
  misc_feature (465)..(465): n is a, c, g, or t
  misc_feature (467)..(467): n is a, c, g, or t
accttcagaagttcagagaggccatganaggagagaagggtatcgggggagcagtctccgccacagatgganctaagcgaagagctcacggaagangcattcactaaccagttaccagctggnttaatannnnnnnnnnnnnnnnnnnnnnnnnnnnnnnnnnnnnnnnnnnnnnnnnnnnngnnttntnntntccagcanattcagntttcatnatcggaaggacggacggaaccgggcttntgtggagagantntgatggantntgaagcagaggcatgggcggaagtgagggtgaagctgcctccttgtaccataagtagctgtaatgtagcttcctgatgcttgactannnnnnnnnnnnnnnntgacttgagantntttttcatgaatgattttaaaagaaaaaaaaanttggattttaaaggtattaaaatatttttgttttgtacgagagtttnntgntntgtatgacgcctgtatgcattgtatattgcaatt

SEQ ID NO: 1772 - DNA, 501 bp, Mus musculus; identical to SEQ ID NO: 1771
  misc_feature (28)..(28): n is a, c, g, or t
  misc_feature (72)..(72): n is a, c, g, or t
  misc_feature (96)..(96): n is a, c, g, or t
  misc_feature (123)..(123): n is a, c, g, or t
  misc_feature (130)..(182): n is a, c, g, or t
  misc_feature (184)..(185): n is a, c, g, or t
  misc_feature (188)..(188): n is a, c, g, or t
  misc_feature (190)..(191): n is a, c, g, or t
  misc_feature (193)..(193): n is a, c, g, or t
  misc_feature (201)..(201): n is a, c, g, or t
  misc_feature (208)..(208): n is a, c, g, or t
  misc_feature (215)..(215): n is a, c, g, or t
  misc_feature (243)..(243): n is a, c, g, or t
  misc_feature (254)..(254): n is a, c, g, or t
  misc_feature (256)..(256): n is a, c, g, or t
  misc_feature (264)..(264): n is a, c, g, or t
  misc_feature (266)..(266): n is a, c, g, or t
  misc_feature (353)..(368): n is a, c, g, or t
  misc_feature (379)..(379): n is a, c, g, or t
  misc_feature (381)..(381): n is a, c, g, or t
  misc_feature (414)..(414): n is a, c, g, or t
  misc_feature (461)..(462): n is a, c, g, or t
  misc_feature (465)..(465): n is a, c, g, or t
  misc_feature (467)..(467): n is a, c, g, or t

SEQ ID NO: 1773 - DNA, 449 bp, Mus musculus
  misc_feature (36)..(50): n is a, c, g, or t
  misc_feature (74)..(131): n is a, c, g, or t
  misc_feature (144)..(144): n is a, c, g, or t
  misc_feature (215)..(250): n is a, c, g, or t
  misc_feature (273)..(273): n is a, c, g, or t
  misc_feature (347)..(347): n is a, c, g, or t
  misc_feature (393)..(393): n is a, c, g, or t
  misc_feature (399)..(399): n is a, c, g, or t
  misc_feature (415)..(415): n is a, c, g, or t
  misc_feature (417)..(417): n is a, c, g, or t
  misc_feature (420)..(420): n is a, c, g, or t
aaagtgtgccgttgtctcttcggtcccgtggacagnnnnnnnnnnnnnnntgattgcgatgcgctcatggcggnnnnnnnnnnnnnnnnnnnnnnnnnnnnnnnnnnnnnnnnnnnnnnnnnnnnnnnnnnggagggcaacttngtctgggagcgcgttcggagcctagggctgcccaaggtctacctgagccctgggtcccgcagccgtgacgnnnnnnnnnnnnnnnnnnnnnnnnnnnnnnnnnnnnccctgctgcaggggccagctccngaggaccacgtggccttgtcgctgtcttgcactctggtgtctgagcggcctgaagattccccgggtgggcccgnaacatctcagggccgaaaacggaggcagaccagcctgacagatttntatcantccaagcgcagattgntnttntgcaagagaaaaccctgaagtgcccacgg

SEQ ID NO: 1774 - DNA, 449 bp, Mus musculus; identical to SEQ ID NO: 1773
  misc_feature (36)..(50): n is a, c, g, or t
  misc_feature (74)..(131): n is a, c, g, or t
  misc_feature (144)..(144): n is a, c, g, or t
  misc_feature (215)..(250): n is a, c, g, or t
  misc_feature (273)..(273): n is a, c, g, or t
  misc_feature (347)..(347): n is a, c, g, or t
  misc_feature (393)..(393): n is a, c, g, or t
  misc_feature (399)..(399): n is a, c, g, or t
  misc_feature (415)..(415): n is a, c, g, or t
  misc_feature (417)..(417): n is a, c, g, or t
  misc_feature (420)..(420): n is a, c, g, or t

SEQ ID NO: 1775 - DNA, 543 bp, Mus musculus
  misc_feature (190)..(211): n is a, c, g, or t
  misc_feature (295)..(296): n is a, c, g, or t
  misc_feature (298)..(298): n is a, c, g, or t
  misc_feature (323)..(323): n is a, c, g, or t
  misc_feature (328)..(328): n is a, c, g, or t
  misc_feature (334)..(334): n is a, c, g, or t
  misc_feature (353)..(353): n is a, c, g, or t
  misc_feature (359)..(359): n is a, c, g, or t
  misc_feature (365)..(365): n is a, c, g, or t
  misc_feature (368)..(369): n is a, c, g, or t
  misc_feature (371)..(371): n is a, c, g, or t
  misc_feature (374)..(374): n is a, c, g, or t
  misc_feature (380)..(380): n is a, c, g, or t
  misc_feature (422)..(422): n is a, c, g, or t
  misc_feature (425)..(425): n is a, c, g, or t
  misc_feature (429)..(429): n is a, c, g, or t
  misc_feature (457)..(457): n is a, c, g, or t
  misc_feature (495)..(495): n is a, c, g, or t
tttctgctgagagtgctgtggtcacactgtgcttcatagtttgcttgctttgtagaatgtttcttaacgtttttgtagttaaatacaaattcctgataaaacattttttcattgcatatattgtatcatgggaatgttacaattttgttgaactaggaaataaaattaacaaataccaggaggctcaaannnnnnnnnnnnnnnnnnnnnntctctagacagctttcatatttagttgtaaagtaagcttatatataattaacaacgttttgttttttaattattgttttttgtnncngctgttgtttttaaagttaaaatgnatatngttttnaccaagtagttgacctttntaattnatattnggnnanatntataanttcttgaaacaaagaattacatttgttttgaaactataattnttntttntaaaatattaccttttatttttggtttnttattcaaagatgataattgagtggattagcacggatntttgaaaagatgattgaatttcaagtctgtaataaccatagcttgttt

SEQ ID NO: 1776 - DNA, 543 bp, Mus musculus; identical to SEQ ID NO: 1775
  misc_feature (190)..(211): n is a, c, g, or t
  misc_feature (295)..(296): n is a, c, g, or t
  misc_feature (298)..(298): n is a, c, g, or t
  misc_feature (323)..(323): n is a, c, g, or t
  misc_feature (328)..(328): n is a, c, g, or t
  misc_feature (334)..(334): n is a, c, g, or t
  misc_feature (353)..(353): n is a, c, g, or t
  misc_feature (359)..(359): n is a, c, g, or t
  misc_feature (365)..(365): n is a, c, g, or t
  misc_feature (368)..(369): n is a, c, g, or t
  misc_feature (371)..(371): n is a, c, g, or t
  misc_feature (374)..(374): n is a, c, g, or t
  misc_feature (380)..(380): n is a, c, g, or t
  misc_feature (422)..(422): n is a, c, g, or t
  misc_feature (425)..(425): n is a, c, g, or t
  misc_feature (429)..(429): n is a, c, g, or t
  misc_feature (457)..(457): n is a, c, g, or t
  misc_feature (495)..(495): n is a, c, g, or t

SEQ ID NO: 1777 - DNA, 449 bp, Mus musculus
  misc_feature (30)..(51): n is a, c, g, or t
  misc_feature (135)..(136): n is a, c, g, or t
  misc_feature (138)..(138): n is a, c, g, or t
  misc_feature (163)..(163): n is a, c, g, or t
  misc_feature (168)..(168): n is a, c, g, or t
  misc_feature (174)..(174): n is a, c, g, or t
  misc_feature (193)..(193): n is a, c, g, or t
  misc_feature (199)..(199): n is a, c, g, or t
  misc_feature (205)..(205): n is a, c, g, or t
  misc_feature (208)..(209): n is a, c, g, or t
  misc_feature (211)..(211): n is a, c, g, or t
  misc_feature (214)..(214): n is a, c, g, or t
  misc_feature (220)..(220): n is a, c, g, or t
  misc_feature (262)..(262): n is a, c, g, or t
  misc_feature (265)..(265): n is a, c, g, or t
  misc_feature (269)..(269): n is a, c, g, or t
  misc_feature (297)..(297): n is a, c, g, or t
  misc_feature (335)..(335): n is a, c, g, or t
taaaattaacaaataccaggaggctcaaannnnnnnnnnnnnnnnnnnnnntctctagacagctttcatatttagttgtaaagtaagcttatatataattaacaacgttttgttttttaattattgttttttgtnncngctgttgtttttaaagttaaaatgnatatngttttnaccaagtagttgacctttntaattnatattnggnnanatntataanttcttgaaacaaagaattacatttgttttgaaactataattnttntttntaaaatattaccttttatttttggtttnttattcaaagatgataattgagtggattagcacggatntttgaaaagatgattgaatttcaagtctgtaataaccatagcttgttttgtgatattgtttttttgttgttgttgttgtttgatataaataaatttacgaacttaaatatatat

SEQ ID NO: 1778 - DNA, 449 bp, Mus musculus; identical to SEQ ID NO: 1777
  misc_feature (30)..(51): n is a, c, g, or t
  misc_feature (135)..(136): n is a, c, g, or t
  misc_feature (138)..(138): n is a, c, g, or t
  misc_feature (163)..(163): n is a, c, g, or t
  misc_feature (168)..(168): n is a, c, g, or t
  misc_feature (174)..(174): n is a, c, g, or t
  misc_feature (193)..(193): n is a, c, g, or t
  misc_feature (199)..(199): n is a, c, g, or t
  misc_feature (205)..(205): n is a, c, g, or t
  misc_feature (208)..(209): n is a, c, g, or t
  misc_feature (211)..(211): n is a, c, g, or t
  misc_feature (214)..(214): n is a, c, g, or t
  misc_feature (220)..(220): n is a, c, g, or t
  misc_feature (262)..(262): n is a, c, g, or t
  misc_feature (265)..(265): n is a, c, g, or t
  misc_feature (269)..(269): n is a, c, g, or t
  misc_feature (297)..(297): n is a, c, g, or t
  misc_feature (335)..(335): n is a, c, g, or t

SEQ ID NO: 1779 - DNA, 346 bp, Mus musculus
  misc_feature (181)..(181): n is a, c, g, or t
  misc_feature (258)..(258): n is a, c, g, or t
  misc_feature (280)..(280): n is a, c, g, or t
  misc_feature (295)..(295): n is a, c, g, or t
  misc_feature (302)..(302): n is a, c, g, or t
  misc_feature (305)..(305): n is a, c, g, or t
  misc_feature (310)..(310): n is a, c, g, or t
  misc_feature (317)..(317): n is a, c, g, or t
  misc_feature (321)..(321): n is a, c, g, or t
tgtatctggcctgatgaatacatttctctacagaactgatttcattttgctcaaggggaaaatgcacttttgtttggcaattcaaaatcctagcacttgatttgctggattttggaaaactccttttttggccctgctgtgtgcttatccatagcaattccattaagtaagaaggtaaacngaagagagaggaaacttgtgctggcgcgtctcacttatgaaacacagcgacgttgctggactggctggggctgggtnccgtccgtgtcgatgctgtaantttaatactaagcantccattntgntcagntgacaantgancctcaatcaagcaggaacttttgct

SEQ ID NO: 1780 - DNA, 346 bp, Mus musculus; identical to SEQ ID NO: 1779
  misc_feature (181)..(181): n is a, c, g, or t
  misc_feature (258)..(258): n is a, c, g, or t
  misc_feature (280)..(280): n is a, c, g, or t
  misc_feature (295)..(295): n is a, c, g, or t
  misc_feature (302)..(302): n is a, c, g, or t
  misc_feature (305)..(305): n is a, c, g, or t
  misc_feature (310)..(310): n is a, c, g, or t
  misc_feature (317)..(317): n is a, c, g, or t
  misc_feature (321)..(321): n is a, c, g, or t

SEQ ID NO: 1781 - DNA, 379 bp, Mus musculus
  misc_feature (32)..(32): n is a, c, g, or t
  misc_feature (40)..(40): n is a, c, g, or t
  misc_feature (91)..(91): n is a, c, g, or t
  misc_feature (175)..(176): n is a, c, g, or t
  misc_feature (178)..(178): n is a, c, g, or t
  misc_feature (216)..(216): n is a, c, g, or t
  misc_feature (229)..(229): n is a, c, g, or t
atttgggagtccacatggtatgcaactgcatnttttgttntccattttcctatgcatcataagcatgtttgtaatactttaaaaatatatntactgccaccacaggaattcacgcctcggtgaatgttagcgtttactgtaaggagttggtggatttgtggtttcattcagtagnntntgctgcttatactcgagtggaatccattcctcacgtantcctgcagacatntgggcctggaatttttttttttttaaacaccacttttactatgtataataaaatatttcattagcttgaattgtatagatttttaaaaattcaataagagcatgttgtttaatttctttttaaaatcactgttgggctttgaaagcattg

SEQ ID NO: 1782 - DNA, 379 bp, Mus musculus; identical to SEQ ID NO: 1781
  misc_feature (32)..(32): n is a, c, g, or t
  misc_feature (40)..(40): n is a, c, g, or t
  misc_feature (91)..(91): n is a, c, g, or t
  misc_feature (175)..(176): n is a, c, g, or t
  misc_feature (178)..(178): n is a, c, g, or t
  misc_feature (216)..(216): n is a, c, g, or t
  misc_feature (229)..(229): n is a, c, g, or t

SEQ ID NO: 1783 - DNA, 409 bp, Mus musculus
  misc_feature (279)..(280): n is a, c, g, or t
gaaggccttgtcctggacacaatgaatgatagcctcagcaagatccttctagacatcagtttccctggcctggaggaggaccctctgggccctgacaacatcaactggtctcagttcatcccttagctgcgatagaggcaaggccttgcccctgccactcaagccgcctgctatcctggcacttgtgtggctcagggtaccccaagccgtctgagggaagctagcaggcaagggctgagctgtgccctttgacctaattatgtcaagatgatagccgcnnctaagccacaccaggacctatgcaagcagtaggatcccccagagtccgagtcctccactccctgctggcaagtgaagtgggtgtgacgagccatgaggaccaggaagtgcccattagtcactcggtgct

SEQ ID NO: 1784 - DNA, 409 bp, Mus musculus; identical to SEQ ID NO: 1783
  misc_feature (279)..(280): n is a, c, g, or t

SEQ ID NO: 1785 - DNA, 137 bp, Mus musculus
  misc_feature (97)..(97): n is a, c, g, or t
ggtaacccttataaatggtgtcagctccccaagttgtcctgtaactataaatgtaagcgtatttccttagctcattatccagagatggcaggatggngagagggacggggttgcactttgcttctgcttgtggcctc

SEQ ID NO: 1786 - DNA, 137 bp, Mus musculus; identical to SEQ ID NO: 1785
  misc_feature (97)..(97): n is a, c, g, or t

SEQ ID NO: 1787 - DNA, 439 bp, Mus musculus
gagccaacgacagcaaagtggttaagtcagactttgtggtgcctccatgtcgcgggcgcagggagcttgtgagcgtggtggacagtgggtctggctacaccgtcacaaggctcagcgcatatcaggtgacaaacctaacaccaggaaccaaatactacatatcctaccgagtacagaaggggacgtcgaccgagtccagtccagagactcccatgtccacgcttcctcgaaaaaacatggagtctattgggttaggaatggcccggacaggagggatggtggtcatcacagtgctgctgtctgtggccatgttcctgttggtcgtgggtcttattgttgccctgcactgggatgcccgcaaatgaaaagggctctcctgcatcccaggctcctccaagaagtccagcctgcctcctgccaggctgtagtcactggcttc

SEQ ID NO: 1788 - DNA, 439 bp, Mus musculus; identical to SEQ ID NO: 1787

SEQ ID NO: 1789 - DNA, 344 bp, Mus musculus
  misc_feature (259)..(273): n is a, c, g, or t
  misc_feature (303)..(317): n is a, c, g, or t
tgctggtcccttacagtctgcagcccctgtccactcccatggtggtggccctggccctacagaacacacctgagcctcttggggtaccatcgcagggtagccctccctagggcctagtttatcagaaaggaagtgctgtggatacccagcacagcctagcttttttcagttttagctccctctggggactttgggatcaggagccactgtagcctcaggaacctgtccaggccagggcagttccccgtgatggttgggnnnnnnnnnnnnnnnatttacagcaggtggctcccttcctgactnnnnnnnnnnnnnnntcccattgaagaccttgaatagggagg

SEQ ID NO: 1790 - DNA, 344 bp, Mus musculus; identical to SEQ ID NO: 1789
  misc_feature (259)..(273): n is a, c, g, or t
  misc_feature (303)..(317): n is a, c, g, or t

SEQ ID NO: 1791 - DNA, 318 bp, Mus musculus
  misc_feature (31)..(31): n is a, c, g, or t
  misc_feature (33)..(33): n is a, c, g, or t
  misc_feature (54)..(54): n is a, c, g, or t
  misc_feature (56)..(56): n is a, c, g, or t
  misc_feature (58)..(70): n is a, c, g, or t
  misc_feature (72)..(72): n is a, c, g, or t
  misc_feature (128)..(128): n is a, c, g, or t
  misc_feature (143)..(165): n is a, c, g, or t
  misc_feature (208)..(208): n is a, c, g, or t
  misc_feature (293)..(293): n is a, c, g, or t
gagggaggccagagaggaggctgaagagaantntgaggagaaacaatgaatcantntnnnnnnnnnnnnntntttttcctttccttttctttttaaaaatttgccctaccctttaaggtttgtttttntgttttgtttttacnnnnnnnnnnnnnnnnnnnnnnnttccaattttcaggttgtttttttgttttgttttttttttaanttttttttcctccaagttttgacaccattgaacatgacttcagaaatccattccccagtcatgaaaatgtactgtgctaactttnttttccatagtggaaacacttattt

SEQ ID NO: 1792 - DNA, 318 bp, Mus musculus; identical to SEQ ID NO: 1791
  misc_feature (31)..(31): n is a, c, g, or t
  misc_feature (33)..(33): n is a, c, g, or t
  misc_feature (54)..(54): n is a, c, g, or t
  misc_feature (56)..(56): n is a, c, g, or t
  misc_feature (58)..(70): n is a, c, g, or t
  misc_feature (72)..(72): n is a, c, g, or t
  misc_feature (128)..(128): n is a, c, g, or t
  misc_feature (143)..(165): n is a, c, g, or t
  misc_feature (208)..(208): n is a, c, g, or t
  misc_feature (293)..(293): n is a, c, g, or t

SEQ ID NO: 1793 - DNA, 203 bp, Mus musculus
cttctggagtattttcatcatttagctattggaatacaattatgaaaaccaactgttgaacatacttggagtagctgtttctttcctaaagaaccaaagttgttttcagctaatagaacaggttgaagtccgcctgcattagctgtgttttccctcatcttgttagagggatgcacagggcacggtgacatcatttccctcat

SEQ ID NO: 1794 - DNA, 203 bp, Mus musculus; identical to SEQ ID NO: 1793

SEQ ID NO: 1795 - DNA, 289 bp, Mus musculus
  misc_feature (95)..(233): n is a, c, g, or t
  misc_feature (236)..(236): n is a, c, g, or t
cccaccaaagcctggggaattctgtgtgctgtgtccaccgtgcctaaataacagaggctatcagagatgggctatcattagaaagtaaaactcannnnnnnnnnnnnnnnnnnnnnnnnnnnnnnnnnnnnnnnnnnnnnnnnnnnnnnnnnnnnnnnnnnnnnnnnnnnnnnnnnnnnnnnnnnnnnnnnnnnnnnnnnnnnnnnnnnnnnnnnnnnnnnnnnnnnnnnnnnaancaaaaacaaaaaaaaaaaaacctctgcccttaaccatgtgacttggaggagca

SEQ ID NO: 1796 - DNA, 289 bp, Mus musculus; identical to SEQ ID NO: 1795
  misc_feature (95)..(233): n is a, c, g, or t
  misc_feature (236)..(236): n is a, c, g, or t

SEQ ID NO: 1797 - DNA, 324 bp, Mus musculus
  misc_feature (28)..(28): n is a, c, g, or t
  misc_feature (99)..(135): n is a, c, g, or t
  misc_feature (151)..(152): n is a, c, g, or t
  misc_feature (162)..(162): n is a, c, g, or t
  misc_feature (235)..(235): n is a, c, g, or t
  misc_feature (240)..(240): n is a, c, g, or t
  misc_feature (271)..(271): n is a, c, g, or t
  misc_feature (296)..(297): n is a, c, g, or t
caagcatgcattttctggaggaagaganactgtggaggagcacaggcagtttgggggcaactgtgaagtggatgtatccttcatgtatctgaccttctnnnnnnnnnnnnnnnnnnnnnnnnnnnnnnnnnnnnngattacaccagcgganncatgctcacnggggagctcaagaagacgctcatagacgtccttcagcccctgatcgcagagcaccaggcccgacgcaaggcgntcacngaggagaccgtgaaggagttcatgacgcccnggcagctgtccttccacttccagtnngcttctgctttgacacttgactgacgg

SEQ ID NO: 1798 - DNA, 324 bp, Mus musculus; identical to SEQ ID NO: 1797
  misc_feature (28)..(28): n is a, c, g, or t
  misc_feature (99)..(135): n is a, c, g, or t
  misc_feature (151)..(152): n is a, c, g, or t
  misc_feature (162)..(162): n is a, c, g, or t
  misc_feature (235)..(235): n is a, c, g, or t
  misc_feature (240)..(240): n is a, c, g, or t
  misc_feature (271)..(271): n is a, c, g, or t
  misc_feature (296)..(297): n is a, c, g, or t

SEQ ID NO: 1799 - DNA, 464 bp, Mus musculus
  misc_feature (362)..(362): n is a, c, g, or t
  misc_feature (428)..(428): n is a, c, g, or t
cacccagcatcctggacagaaataaaactggactattgggaatattttggaagtgtgcccgaattggggaacgcaagagtccttatgtcgccatatgctgtatagtgatggccttcagcatcctcttcatacagtagctttggaaactaccagcatgtgcttgctatcagactgtaaacaaggacttgcctccagaaaataatgggaagaatggttaagccatttgtctctgaacatggaatgagataaacttcaagatgctgttctctatttttatgctattggaccaatgagctgaatgaataattaagatgtaacagttcaatacacaggaatgtgattgtatccatcaacctcagttntctcactccagtattacattctgcaaatgtcattctgttgtgtcaggactgcttttcataaggttnttcgggcacgaagtagaaacccagtggcaaattcca

SEQ ID NO: 1800 - DNA, 464 bp, Mus musculus; identical to SEQ ID NO: 1799
  misc_feature (362)..(362): n is a, c, g, or t
  misc_feature (428)..(428): n is a, c, g, or t

SEQ ID NO: 1801 - DNA, 93 bp, Mus musculus
tactctgtaccctggcatccttggtgaggactttgggggtccttgggggtcccatagcaagcaccctgtttgcaatccacaggggagaaacct

SEQ ID NO: 1802 - DNA, 93 bp, Mus musculus; identical to SEQ ID NO: 1801

SEQ ID NO: 1803 - DNA, 349 bp, Mus musculus
  misc_feature (166)..(166): n is a, c, g, or t
  misc_feature (290)..(290): n is a, c, g, or t
ctcatgacttttaagaactgtagtaatgtggcttaggaaatataatggcctaattgttttcaaaatgtaagttcctgtgaagaattttgtttatattgggttggggacctataggtttaaaatagaatgtcagtcagctgacttaaaaaacattggttttactaantctgccttccccttctaaggaagaactgagtgggtaagggacaggtgtgtaaaatctccaaatggatgttacagctttcagcttgaacgtttgtttccagacctgattaaaatttggtttattntaatttctgtactatatcatctgaggttttaagtggtaactggttctataccatgtatg

SEQ ID NO: 1804 - DNA, 349 bp, Mus musculus; identical to SEQ ID NO: 1803
  misc_feature (166)..(166): n is a, c, g, or t
  misc_feature (290)..(290): n is a, c, g, or t

SEQ ID NO: 1805 - DNA, 284 bp, Mus musculus
  misc_feature (166)..(182): n is a, c, g, or t
  misc_feature (229)..(253): n is a, c, g, or t
gaagaactgctcagggccatcagtgccacaacagggaaactgatgcccaacccactttcatgcggtgccgacttctttgggttttctcatccaaccatccacaacctgattcagagttgtccagaagctcaaaactgtgtcaattaccagtgggtgaaatttgatnnnnnnnnnnnnnnnnnggggcagctctctcaggaactgccagagaatgatgcaactatgagcnnnnnnnnnnnnnnnnnnnnnnnnnttgatgatgaccatgatgattccattctgcc

SEQ ID NO: 1806 - DNA, 284 bp, Mus musculus; identical to SEQ ID NO: 1805
  misc_feature (166)..(182): n is a, c, g, or t
  misc_feature (229)..(253): n is a, c, g, or t

SEQ ID NO: 1807 - DNA, 433 bp, Mus musculus
  misc_feature (87)..(87): n is a, c, g, or t
  misc_feature (158)..(158): n is a, c, g, or t
  misc_feature (201)..(201): n is a, c, g, or t
  misc_feature (307)..(307): n is a, c, g, or t
  misc_feature (321)..(321): n is a, c, g, or t
tgctacaactccacggcgaccaatgactccaccgtctttgataagctctttttctcccagctaagccggttggggccgcgggcgaanctgaggcagactgctgacatatgtgcactccctgcaaaagctcacatctaccgtgagggctgcgcgcagancctccagaagtggctgcacaacaatatcatctccatagtgggnatctgtctgggagtcggtcttcttgagctcggcttcatgacgctctcaatattcctgtgtagaaatctggatcacgtctatgaccggctggcccggtaccgctagnccccagcccacccntcggcacccacgcacctccatgcagtcaggaaatgtttccttcctggttggtcacaggcttggagcccatgcctcaggcctcatcccctggggacccagctgtctgccctat

SEQ ID NO: 1808 - DNA, 433 bp, Mus musculus; identical to SEQ ID NO: 1807
  misc_feature (87)..(87): n is a, c, g, or t
  misc_feature (158)..(158): n is a, c, g, or t
  misc_feature (201)..(201): n is a, c, g, or t
  misc_feature (307)..(307): n is a, c, g, or t
  misc_feature (321)..(321): n is a, c, g, or t

SEQ ID NO: 1809 - DNA, 308 bp, Mus musculus
  misc_feature (37)..(37): n is a, c, g, or t
  misc_feature (40)..(40): n is a, c, g, or t
  misc_feature (127)..(127): n is a, c, g, or t
  misc_feature (261)..(276): n is a, c, g, or t
gccaccgtctttcctgacttgggagctgctatttggnccnaagaagggcacagctgtattctggtacaaccttcttcgcagtggggaaggtgattatcggacgagacatgcagcctgccctgtgctngtgggctgcaagtgggtctccaacaagtggttccatgagcgaggacaggagttcttaagaccttgtggaacaacggaagttgattgacgtccttttctctccgctcctccctggcccatagtccaaatcatctnnnnnnnnnnnnnnnnagcttcctttttatgtcccagctcctgtcagg

SEQ ID NO: 1810 - DNA, 308 bp, Mus musculus; identical to SEQ ID NO: 1809
  misc_feature (37)..(37): n is a, c, g, or t
  misc_feature (40)..(40): n is a, c, g, or t
  misc_feature (127)..(127): n is a, c, g, or t
  misc_feature (261)..(276): n is a, c, g, or t

SEQ ID NO: 1811 - DNA, 507 bp, Mus musculus
  misc_feature (144)..(144): n is a, c, g, or t
  misc_feature (150)..(150): n is a, c, g, or t
  misc_feature (153)..(154): n is a, c, g, or t
  misc_feature (162)..(162): n is a, c, g, or t
  misc_feature (164)..(164): n is a, c, g, or t
  misc_feature (167)..(167): n is a, c, g, or t
  misc_feature (174)..(174): n is a, c, g, or t
  misc_feature (189)..(189): n is a, c, g, or t
  misc_feature (197)..(197): n is a, c, g, or t
  misc_feature (200)..(200): n is a, c, g, or t
  misc_feature (211)..(211): n is a, c, g, or t
  misc_feature (247)..(247): n is a, c, g, or t
  misc_feature (263)..(263): n is a, c, g, or t
  misc_feature (280)..(280): n is a, c, g, or t
  misc_feature (296)..(296): n is a, c, g, or t
  misc_feature (305)..(330): n is a, c, g, or t
  misc_feature (332)..(333): n is a, c, g, or t
  misc_feature (337)..(337): n is a, c, g, or t
  misc_feature (339)..(339): n is a, c, g, or t
  misc_feature (342)..(344): n is a, c, g, or t
  misc_feature (346)..(346): n is a, c, g, or t
  misc_feature (348)..(348): n is a, c, g, or t
  misc_feature (357)..(357): n is a, c, g, or t
  misc_feature (366)..(366): n is a, c, g, or t
  misc_feature (414)..(414): n is a, c, g, or t
  misc_feature (466)..(466): n is a, c, g, or t
  misc_feature (469)..(470): n is a, c, g, or t
  misc_feature (472)..(472): n is a, c, g, or t
  misc_feature (475)..(482): n is a, c, g, or t
acctgtgaagactggctgcctagtagtagagatgggtggacggtgtgaatttgaagaggtaaaaggtatcctgaaccaagttgctcacaagttaccctttccggcaaaggctgtgagccgtaagactctagagaggatgcaccnaaatcnaanngagagagnanttnacaaccnaaacccctggacctntgagcacntanccactgccaanatgtttggcatacggaaattcctgagcccatatganttgacgcagaaagggngatactggggcaaattntacatgcccaagcgtntgtagtgannnnnnnnnnnnnnnnnnnnnnnnnncnngagngncannntncncctttactntcctgaggntctttgctggttcttggatcctaactaagcacatgagtgagtgacttntgaaaaactgtgtcacctggttgattctaattaaagtttgaatgtaacctcnggnnanaannnnnnnntggtcagtttcagttgcttacagga

SEQ ID NO: 1812 - DNA, 507 bp, Mus musculus; identical to SEQ ID NO: 1811
  misc_feature (144)..(144): n is a, c, g, or t
  misc_feature (150)..(150): n is a, c, g, or t
  misc_feature (153)..(154): n is a, c, g, or t
  misc_feature (162)..(162): n is a, c, g, or t
  misc_feature (164)..(164): n is a, c, g, or t
  misc_feature (167)..(167): n is a, c, g, or t
  misc_feature (174)..(174): n is a, c, g, or t
  misc_feature (189)..(189): n is a, c, g, or t
  misc_feature (197)..(197): n is a, c, g, or t
  misc_feature (200)..(200): n is a, c, g, or t
  misc_feature (211)..(211): n is a, c, g, or t
  misc_feature (247)..(247): n is a, c, g, or t
  misc_feature (263)..(263): n is a, c, g, or t
  misc_feature (280)..(280): n is a, c, g, or t
  misc_feature (296)..(296): n is a, c, g, or t
  misc_feature (305)..(330): n is a, c, g, or t
  misc_feature (332)..(333): n is a, c, g, or t
  misc_feature (337)..(337): n is a, c, g, or t
  misc_feature (339)..(339): n is a, c, g, or t
  misc_feature (342)..(344): n is a, c, g, or t
  misc_feature (346)..(346): n is a, c, g, or t
  misc_feature (348)..(348): n is a, c, g, or t
  misc_feature (357)..(357): n is a, c, g, or t
  misc_feature (366)..(366): n is a, c, g, or t
  misc_feature (414)..(414): n is a, c, g, or t
  misc_feature (466)..(466): n is a, c, g, or t
  misc_feature (469)..(470): n is a, c, g, or t
  misc_feature (472)..(472): n is a, c, g, or t
  misc_feature (475)..(482): n is a, c, g, or t

SEQ ID NO: 1813 - DNA, 493 bp, Mus musculus
  misc_feature (46)..(60): n is a, c, g, or t
  misc_feature (181)..(181): n is a, c, g, or t
  misc_feature (262)..(277): n is a, c, g, or t
  misc_feature (352)..(376): n is a, c, g, or t
atctagttctaaagaggtgcagtcccctgcaagttccatgtaaggnnnnnnnnnnnnnnnttgcaacatttttcttccttaggccccaaacccagccgtttatatgaaattgtagaatttttaactattggaaacaaatggtttttttatatatacttactatgcaggccaaaggggcccnacggactcacccagggacataatctggctcccaggtggctgcttttcctcacatctgttcatcttctcaatctcaagttannnnnnnnnnnnnnnncccccttcaaggtcaagtccttggtgcctggcctcaaagagggctcagcctgcactagagcaggtctacatggcnnnnnnnnnnnnnnnnnnnnnnnnncttccgagccatcaccaccagagtagaggggttcacactggagtagatcccacctagcagccaccacgtggaacaggggtcctgtgaagagagtgggtcccacatcaggttgcacca

SEQ ID NO: 1814 - DNA, 493 bp, Mus musculus; identical to SEQ ID NO: 1813
  misc_feature (46)..(60): n is a, c, g, or t
  misc_feature (181)..(181): n is a, c, g, or t
  misc_feature (262)..(277): n is a, c, g, or t
  misc_feature (352)..(376): n is a, c, g, or t

SEQ ID NO: 1815 - DNA, 395 bp, Mus musculus
  misc_feature (317)..(317): n is a, c, g, or t
  misc_feature (341)..(341): n is a, c, g, or t
  misc_feature (343)..(343): n is a, c, g, or t
  misc_feature (352)..(352): n is a, c, g, or t
  misc_feature (357)..(358): n is a, c, g, or t
  misc_feature (364)..(364): n is a, c, g, or t
tggcctttacttggtgccttctggtttgcactggtctgagctctgtgaatgaagtaatataacagctcactgtatcccatctgtcctggattgggtcactgggactctgaaaggtgccccattttatagaaccagcttttaatgtatatttgaaagaggccagaaatttgttaccttattttctttgggttcttctctggctccaaaataatcatttcttcttcttcactatctgatagcactataggggcacctttggaaaagtccaaaaaaggagtttactgcttaagcacatcagaggtcctaacgctcccatntccaggctaagggagctcccaagntntactgcccnggagnntgacantctttccgaatcttaccctgttctaagtaag

SEQ ID NO: 1816 - DNA, 395 bp, Mus musculus; identical to SEQ ID NO: 1815
  misc_feature (317)..(317): n is a, c, g, or t
  misc_feature (341)..(341): n is a, c, g, or t
  misc_feature (343)..(343): n is a, c, g, or t
  misc_feature (352)..(352): n is a, c, g, or t
  misc_feature (357)..(358): n is a, c, g, or t
  misc_feature (364)..(364): n is a, c, g, or t

SEQ ID NO: 1817 - DNA, 56 bp, Mus musculus
ccagctctgtcaagtgacccagtgatagtcggctgcctgattcacgattacttccc

SEQ ID NO: 1818 - DNA, 56 bp, Mus musculus; identical to SEQ ID NO: 1817

SEQ ID NO: 1819 - DNA, 425 bp, Mus musculus
  misc_feature (373)..(387): n is a, c, g, or t
tgcttgaggtctagaggaacgactgagatgccccagccttgtgaagcagaagagaaaacaagcaaaccagctgcagaaatcttgataaagcctcaggaagagaaaggagtctctggagagtctgatgttaggtgtttgaggtccagaaaaactagagtcgctttggacagtgaacctaagccaagggtaactcgtggaaccaagaaagatgcaaaaactctgaaggaggatgaagacattgtatgcaccaagaagttaagaacaagaagttaagaacaagaagttaccagaaaagtgaaactatgtagcaaagacatttaagaaggaaaagtaaatttgacttagtgataagttccagtgtggttttcacctnnnnnnnnnnnnnnnactgtaaatactactgctactgcctgagtttaaggaag

SEQ ID NO: 1820 - DNA, 425 bp, Mus musculus; identical to SEQ ID NO: 1819
  misc_feature (373)..(387): n is a, c, g, or t

SEQ ID NO: 1821 - DNA, 195 bp, Mus musculus
  misc_feature (53)..(53): n is a, c, g, or t
  misc_feature (65)..(65): n is a, c, g, or t
  misc_feature (160)..(160): n is a, c, g, or t
agatgacatcatcactgacattgagatggtggatgaaggctggtggcggggcnaatgccgtggcnactttggacttttccctgcaaactatgtcaagctcctctaatgaccagcccattgtcttccgacttcccgaattcgaagctgctctgcctccctnttcccactccatggtactgctgcaaggacctggct

SEQ ID NO: 1822 - DNA, 195 bp, Mus musculus; identical to SEQ ID NO: 1821
  misc_feature (53)..(53): n is a, c, g, or t
  misc_feature (65)..(65): n is a, c, g, or t
  misc_feature (160)..(160): n is a, c, g, or t

SEQ ID NO: 1823 - DNA, 512 bp, Mus musculus
  misc_feature (81)..(81): n is a, c, g, or t
  misc_feature (114)..(114): n is a, c, g, or t
  misc_feature (234)..(234): n is a, c, g, or t
  misc_feature (453)..(454): n is a, c, g, or t
  misc_feature (457)..(471): n is a, c, g, or t
attttgtgatagatggtggccccgaggaagctgccgccaaggaagaggagcagcggtgtcaagcagagcagacccgagatncacgtgacacagacagtgacgggggcctgggcntgagctctcagggtcctgtgggctcaggcagcagcgccgaggccctgctgagtgacctgcatgccttttctggtagtgctgcctgggatgacagcgctggaggagcagggggccagggcntccgggtcactgcactataggagtcagcttgtcctgttcctgccccagcctctgacttttcccatgcatgttatggtgaaacacaagctgccctggaccttcgtcaccccacccttacatcagcttcttagactgacaccccaaccagttccccagagtgtgtgtgtgcatcccagacaggcactgggcaaacattaaaaataaaactttgtaagcacnnaannnnnnnnnnnnnnnggatcccctcctctccctaaacatgccactcttgtgtcccg

SEQ ID NO: 1824 - DNA, 512 bp, Mus musculus; identical to SEQ ID NO: 1823
  misc_feature (81)..(81): n is a, c, g, or t
  misc_feature (114)..(114): n is a, c, g, or t
  misc_feature (234)..(234): n is a, c, g, or t
  misc_feature (453)..(454): n is a, c, g, or t
  misc_feature (457)..(471): n is a, c, g, or t

SEQ ID NO: 1825 - DNA, 590 bp, Mus musculus
  misc_feature (180)..(181): n is a, c, g, or t
  misc_feature (183)..(183): n is a, c, g, or t
  misc_feature (243)..(243): n is a, c, g, or t
  misc_feature (258)..(258): n is a, c, g, or t
  misc_feature (261)..(261): n is a, c, g, or t
  misc_feature (266)..(266): n is a, c, g, or t
  misc_feature (269)..(269): n is a, c, g, or t
  misc_feature (271)..(271): n is a, c, g, or t
  misc_feature (276)..(276): n is a, c, g, or t
  misc_feature (288)..(288): n is a, c, g, or t
  misc_feature (296)..(296): n is a, c, g, or t
  misc_feature (303)..(303): n is a, c, g, or t
  misc_feature (307)..(307): n is a, c, g, or t
  misc_feature (385)..(385): n is a, c, g, or t
  misc_feature (495)..(495): n is a, c, g, or t
  misc_feature (497)..(497): n is a, c, g, or t
  misc_feature (505)..(505): n is a, c, g, or t
  misc_feature (547)..(562): n is a, c, g, or t
aggacagggattgctggagaacactgcgagctgtggagcacacttaagggatgggatggtcagaggcgctcccgagcaagcggggcatcattctcccttagatcctagtgtggctaagcagggatgtggcagagagatctgtgtggatctggcttcctgctgctggggcctggctgggcnnanagctccaagcctcactgccttcctggggtcctaattaactcggcctactcaatgagaacntaacatgcttattgnatntatanccntntttgnctgagtaacctntcccaccnttgaggntatntgaagtgtattgtatgaaggaagtatcaagaacaaatcattggcccgttatagcaaatagttgcttaagtagcagttntcatagactaatcataaaatattttgcacaaaatttcaatgttgaacttgcacttactgttgttatagtaaattataaatcacagcttctagctaggccaaaatacttantntactgatnttcaaaataaatgtatttcataaattattgtgtgttaatttnnnnnnnnnnnnnnnngatatgatgcaaagttcctttgtaaatc

SEQ ID NO: 1826 - DNA, 590 bp, Mus musculus; identical to SEQ ID NO: 1825
  misc_feature (180)..(181): n is a, c, g, or t
  misc_feature (183)..(183): n is a, c, g, or t
  misc_feature (243)..(243): n is a, c, g, or t
  misc_feature (258)..(258): n is a, c, g, or t
  misc_feature (261)..(261): n is a, c, g, or t
  misc_feature (266)..(266): n is a, c, g, or t
  misc_feature (269)..(269): n is a, c, g, or t
  misc_feature (271)..(271): n is a, c, g, or t
  misc_feature (276)..(276): n is a, c, g, or t
  misc_feature (288)..(288): n is a, c, g, or t
  misc_feature (296)..(296): n is a, c, g, or t
  misc_feature (303)..(303): n is a, c, g, or t
  misc_feature (307)..(307): n is a, c, g, or t
  misc_feature (385)..(385): n is a, c, g, or t
  misc_feature (495)..(495): n is a, c, g, or t
  misc_feature (497)..(497): n is a, c, g, or t
  misc_feature (505)..(505): n is a, c, g, or t
  misc_feature (547)..(562): n is a, c, g, or t

SEQ ID NO: 1827 - DNA, 550 bp, Mus musculus
  misc_feature (27)..(27): n is a, c, g, or t
  misc_feature (63)..(63): n is a, c, g, or t
  misc_feature (91)..(91): n is a, c, g, or t
  misc_feature (137)..(137): n is a, c, g, or t
  misc_feature (139)..(140): n is a, c, g, or t
  misc_feature (324)..(340): n is a, c, g, or t
  misc_feature (343)..(343): n is a, c, g, or t
  misc_feature (367)..(367): n is a, c, g, or t
  misc_feature (379)..(379): n is a, c, g, or t
  misc_feature (427)..(443): n is a, c, g, or t
  misc_feature (455)..(459): n is a, c, g, or t
  misc_feature (461)..(462): n is a, c, g, or t
  misc_feature (476)..(476): n is a, c, g, or t
  misc_feature (494)..(494): n is a, c, g, or t
  misc_feature (516)..(516): n is a, c, g, or t
tagcctccctttgacaatggctctgcntctaaaggtcctgagccggagcatggccagcgcacncaaaggagaccatggaggggcaggagcnaacacctggcgcctcctgacctttgtgctggctcttcccggcgtancnntctgctcccttaactgctggatgcacgctggccaccacgagcgcccagagttcatcccgtatcaccacctccgcatccgaaccaagcccttcgcctggggggacggcaaccacacgcttttccacaatccccacgtcaatcctttgcccaccggttatgagcacccttgatgtctcagcagacnnnnnnnnnnnnnnnnnttncaaattggccttctgcacaccggntctgagagcccntgaggttccagtggacagttccaagctcaataaaggtgtggaagtttnnnnnnnnnnnnnnnnntgggaacagcannnnngnnggggctgggcaggntcttgggcagttggtatntgggttccagttattttttttnatataaggaaaatgtgatgtttccacctgcattt

SEQ ID NO: 1828 - DNA, 550 bp, Mus musculus; identical to SEQ ID NO: 1827
  misc_feature (27)..(27): n is a, c, g, or t
  misc_feature (63)..(63): n is a, c, g, or t
  misc_feature (91)..(91): n is a, c, g, or t
  misc_feature (137)..(137): n is a, c, g, or t
  misc_feature (139)..(140): n is a, c, g, or t
  misc_feature (324)..(340): n is a, c, g, or t
  misc_feature (343)..(343): n is a, c, g, or t
  misc_feature (367)..(367): n is a, c, g, or t
  misc_feature (379)..(379): n is a, c, g, or t
  misc_feature (427)..(443): n is a, c, g, or t
  misc_feature (455)..(459): n is a, c, g, or t
  misc_feature (461)..(462): n is a, c, g, or t
  misc_feature (476)..(476): n is a, c, g, or t
  misc_feature (494)..(494): n is a, c, g, or t
  misc_feature (516)..(516): n is a, c, g, or t

SEQ ID NO: 1829 - DNA, 601 bp, Mus musculus
  misc_feature (26)..(26): n is a, c, g, or t
  misc_feature (28)..(37): n is a, c, g, or t
  misc_feature (52)..(52): n is a, c, g, or t
  misc_feature (70)..(70): n is a, c, g, or t
  misc_feature (148)..(148): n is a, c, g, or t
  misc_feature (277)..(277): n is a, c, g, or t
  misc_feature (362)..(362): n is a, c, g, or t
  misc_feature (399)..(400): n is a, c, g, or t
  misc_feature (404)..(404): n is a, c, g, or t
  misc_feature (422)..(423): n is a, c, g, or t
  misc_feature (429)..(429): n is a, c, g, or t
  misc_feature (464)..(464): n is a, c, g, or t
  misc_feature (473)..(474): n is a, c, g, or t
  misc_feature (516)..(516): n is a, c, g, or t
  misc_feature (544)..(544): n is a, c, g, or t
  misc_feature (548)..(548): n is a, c, g, or t
  misc_feature (559)..(559): n is a, c, g, or t
attgccaagtcgttctacgatctcantnnnnnnnnnntggatggggagaagntagacttcaatacgttcngaggcagggctgtgctgattgagaatgtggcgtcactctgaggaacaactacccgggactacaaccagctcaatgagntgcaatgtcgctttcccaggcgcctggtagttctcggcttcccttgcaaccagttcggacatcaggagaactgtcagaacgaggagatcctgaacagcctcaagtatgtccgacctgggggtgggtacnagcccacctttagtcttacccaaaagtgtgacgtcaatgggcagaacgagcatcctgtctttgcctacctgaaagacaagctgcnctacccttatgatgacccgttctccctcatgaccgannccangctcatcatatggagtcnngtgcgncgctcagacgtgtcctggaactttgagaagttccntcatagggnnagaaggggagcccttccgtcgctacagccgcagcttccagancatcaacatcgagcctgacatcaaacgnctcntcaaagttgcnatctagatgagagctgctcagcccaggaatctcccactgttt

SEQ ID NO: 1830 - DNA, 601 bp, Mus musculus; identical to SEQ ID NO: 1829
  misc_feature (26)..(26): n is a, c, g, or t
  misc_feature (28)..(37): n is a, c, g, or t
  misc_feature (52)..(52): n is a, c, g, or t
  misc_feature (70)..(70): n is a, c, g, or t
  misc_feature (148)..(148): n is a, c, g, or t
  misc_feature (277)..(277): n is a, c, g, or t
  misc_feature (362)..(362): n is a, c, g, or t
  misc_feature (399)..(400): n is a, c, g, or t
  misc_feature (404)..(404): n is a, c, g, or t
  misc_feature (422)..(423): n is a, c, g, or t
  misc_feature (429)..(429): n is a, c, g, or t
  misc_feature (464)..(464): n is a, c, g, or t
  misc_feature (473)..(474): n is a, c, g, or t
  misc_feature (516)..(516): n is a, c, g, or t
  misc_feature (544)..(544): n is a, c, g, or t
  misc_feature (548)..(548): n is a, c, g, or t
  misc_feature (559)..(559): n is a, c, g, or t

SEQ ID NO: 1831 - DNA, 560 bp, Mus musculus
ccgggaaatgccacggtgcgcttgcggagcggcgaacggaaggggctgagggaactacatcgtggtgactgggtactggccgctgatgcagcgggccgagtggtacccacgccagtgctgctcttcctggaccgggatctgcagcgccgcgcctcgttcgtggctgtggagaccgagcggcctccgcgcaaactgttgctcacaccctggcatctggtgttcgctgctcgcgggccagcgcctgctccaggtgactttgcaccggtgttcgcgcgccgcttacgtgctggcgactcggtgctggctcccggcggggacgcgctccagccggcgcgcgtagcccgcgtggcgcgcgaggaagccgtgggcgtgttcgcaccgctcactgcgcacgggacgctgctggtcaacgacgtcctcgcctcctgctacgcggttctagagagtcaccagtgggcccaccgcgccttcgcccctttgcggctgctgcacgcgctcggggctctgctccctgggggtgcagtccagccgactggcatgcattggtactctcgcctcct

SEQ ID NO: 1832 - DNA, 560 bp, Mus musculus; identical to SEQ ID NO: 1831

SEQ ID NO: 1833 - DNA, 454 bp, Mus musculus
  misc_feature (38)..(38): n is a, c, g, or t
  misc_feature (91)..(91): n is a, c, g, or t
  misc_feature (121)..(121): n is a, c, g, or t
  misc_feature (152)..(152): n is a, c, g, or t
  misc_feature (166)..(181): n is a, c, g, or t
  misc_feature (204)..(204): n is a, c, g, or t
  misc_feature (237)..(237): n is a, c, g, or t
  misc_feature (254)..(254): n is a, c, g, or t
  misc_feature (264)..(264): n is a, c, g, or t
  misc_feature (278)..(293): n is a, c, g, or t
  misc_feature (328)..(328): n is a, c, g, or t
  misc_feature (340)..(340): n is a, c, g, or t
  misc_feature (377)..(377): n is a, c, g, or t
  misc_feature (429)..(429): n is a, c, g, or t
ttacaggattcaggtatgttgccttcacggttttcccnaccccctcctgccctttatcctttaggccgtgtggccatgaacctggaagaantgatcgtttgcacttgagtgctacactctngcacctttccaaagtaagctggtttggaggncctgttgtcatgtnnnnnnnnnnnnnnnnttaccgcgctctgtttgaaacangtctttgtattcctaatgacttcagttagagtnaggagaatagctgttantatggatgtnaggtacttaagggnnnnnnnnnnnnnnnnttttgtcttggatattcttgaaagtttatattttnataatttttttnacatcagatgtcagatgtttctttcagttgcttgatntttggaattattatgtggctttttttgtaaatattgaaatgtagcaataatntcttttgaatattcctgagcccatg

SEQ ID NO: 1834 - DNA, 454 bp, Mus musculus; identical to SEQ ID NO: 1833
  misc_feature (38)..(38): n is a, c, g, or t
  misc_feature (91)..(91): n is a, c, g, or t
  misc_feature (121)..(121): n is a, c, g, or t
  misc_feature (152)..(152): n is a, c, g, or t
  misc_feature (166)..(181): n is a, c, g, or t
  misc_feature (204)..(204): n is a, c, g, or t
  misc_feature (237)..(237): n is a, c, g, or t
  misc_feature (254)..(254): n is a, c, g, or t
  misc_feature (264)..(264): n is a, c, g, or t
  misc_feature (278)..(293): n is a, c, g, or t
  misc_feature (328)..(328): n is a, c, g, or t
  misc_feature (340)..(340): n is a, c, g, or t
  misc_feature (377)..(377): n is a, c, g, or t
  misc_feature (429)..(429): n is a, c, g, or t

SEQ ID NO: 1835 - DNA, 514 bp, Mus musculus
aatggttcgtacagcagcggaagtggctggtcagctcattattaaacttacccatgacgttgaattgaacctggactatgagatgtataacagcaaactactgtcatttatgaaggatctgaaccagttcaaaacagatatcagggatatgggtctaagtctacagtggctgtattccgctcgtggagactacttccgtgctacttctagactaacaactgattttcataatgctgagaaaacaaacagatttgtcatgagggaaatcaatgatcgtattatgaaagtggagtatcacttcctgtcgccctatgtatctccaagagagtctcctttccgacatatcttctggggctctggctctcacactctctcagctttagtggagaacttgaagcttcgtcaaaaaaatattactgcttttaatgaaaccctcttcagaaaccagttggccctggctacttggactattcagggagtcgcaaatgccctctctggtgacatttggaatatt

SEQ ID NO: 1836 - DNA, 545 bp, Mus musculus
tttagccttgctcggcaagtagatggagataacagtcatgtggagatgaaactggctgcagatgaagaagaaaatgccgacaataacatgaaggctagtgtcagaaaacccaagaggtttaatggaagactctgctttgcagctattgcactagtcattttcttcttgattggattcatgagtggctacctgggctattgtaagcgtgtagaacaaaaagaggagtgtgtgaaactggctgaaacggaggagacagacaagtcagaaaccatggaaacagaggatgttcctacatcatctcgcttatattgggcagacctcaaaacactgttgtcagagaagttgaactccatagagtttgctgacaccatcaagcagctgagccagaatacatacactcctcgtgaggctggatctcaaaaagatgaaagtcttgcctattatattgaaaatcagttccatgaatttaaattcagcaaagtctggcgagatgaacactatgtgaagattcaagtgaaaagcagcattggtcaaaacatggtgac

SEQ ID NO: 1837 - DNA, 525 bp, Mus musculus
ggtgatccatacacacctggctttccttctttcaatcatactcagtttccgccatctcagtcatcagggttgcctaatatacctgtgcaaacaatctcaagagctgctgcagaaaagctatttggaaaaatggaaggaagctgtcctgctagatggaacatagattcttcatgtaagctggaactttcacagaatcaaaatgtgaagctcattgtgaaaaacgtactgaaagaaagaagaatacttaacatctttggagttattaaaggttatgaggaaccagaccgttatgttgtagtaggagcccagagagacgctttgggtgctggtgttgcggcgaagtccagtgtgggaacaggtcttctgttgaaacttgcccaagtattctcagatatgatttcaaaagatggatttagacccagcagaagtataatctttgccagctggactgcaggcgactttggagctgttggtgccactgagtggttggagggatacctttcatctttgcatttaaaagctttc

SEQ ID NO: 1838 - DNA, 279 bp, Mus musculus
gttacccaagtcactgcctaaaaagttgggcccagagatgccctccttatagcaccatgtgtcttgagtatctttagacaaagcaggcaggatggtccagccttgggatgaaagtgaggggagaaaacattagcctgggagccagctggaccctcttaaaagcggccatattagctggtcagaatcagagatagactcaagctgggttctaattaaatttttatgatcccagcctagagctcatgtgcagaggaatgttaatcaccaggatgatgttgc

SEQ ID NO: 1839 - DNA, 279 bp, Mus musculus; identical to SEQ ID NO: 1838

SEQ ID NO: 1840 - DNA, 391 bp, Mus musculus
  misc_feature (249)..(249): n is a, c, g, or t
  misc_feature (327)..(329): n is a, c, g, or t
  misc_feature (331)..(331): n is a, c, g, or t
ctccagattgcaaatgatgtaagaaagccccctccctctgagttcagcgtccctgggtctccccttgcagaaggcaggcgtcttttgaaagacaaggtaatgttgcctgcgtggtgaaccctgtgggaaactgctgaccccacgggggctttgtcccagccttctgcttcaccttttaggttttgggaattcatgatcactgagtactgatgagagtcatcatcatgtttgaaagattaatttggcctntattcaaagatcatttagtgcaatcatactgaagttccccagagatacacatgtctgtgatttggggcaagaaaaaannnanaaattgcatcagtattggacagattaatgaattaaaattttagtgccactgtcttgctta

SEQ ID NO: 1841 - DNA, 391 bp, Mus musculus; identical to SEQ ID NO: 1840
  misc_feature (249)..(249): n is a, c, g, or t
  misc_feature (327)..(329): n is a, c, g, or t
  misc_feature (331)..(331): n is a, c, g, or t

SEQ ID NO: 1842 - DNA, 557 bp, Mus musculus
  misc_feature (26)..(26): n is a, c, g, or t
  misc_feature (102)..(102): n is a, c, g, or t
  misc_feature (126)..(126): n is a, c, g, or t
  misc_feature (184)..(184): n is a, c, g, or t
  misc_feature (186)..(186): n is a, c, g, or t
  misc_feature (249)..(249): n is a, c, g, or t
  misc_feature (262)..(263): n is a, c, g, or t
  misc_feature (288)..(288): n is a, c, g, or t
  misc_feature (293)..(293): n is a, c, g, or t
atttgtctcgctgaggtagacagccncttcaggaaggggagcctgctacctaacactgcttctagactcttcgcccacttgatagtgcggcctgttttcacntccaggtcacagaaaacagcaacntcctgacgggagaggaccatcttcacatctaccaaaataaaatggaggcatggaaagngnggcctcctgtttgatctataggatttagctccatgctttggacaaaagtcaagagaatcccanaaagggctcttgnnagactttaaacatggggttggccgntcctnctgcacacacaacacaatctccaaaccctggttcttccctcattggagaagaggcaaagcctttgctcctcacctccatcccagcaaactcttcagaattagaacagatgcagaggacaaggagaaaatcctttcctgtggacgaacagcacattttcaacattaaaaccacagatgataggaaaggcacactcataggtgagattaaacaggagactcaaatgaggggctttcctacttaagggaccaagtcctaccaaagag

SEQ ID NO: 1843 - DNA, 557 bp, Mus musculus; identical to SEQ ID NO: 1842
  misc_feature (26)..(26): n is a, c, g, or t
  misc_feature (102)..(102): n is a, c, g, or t
  misc_feature (126)..(126): n is a, c, g, or t
  misc_feature (184)..(184): n is a, c, g, or t
  misc_feature (186)..(186): n is a, c, g, or t
  misc_feature (249)..(249): n is a, c, g, or t
  misc_feature (262)..(263): n is a, c, g, or t
  misc_feature (288)..(288): n is a, c, g, or t
  misc_feature (293)..(293): n is a, c, g, or t

SEQ ID NO: 1844 - DNA, 426 bp, Mus musculus
  misc_feature (89)..(89): n is a, c, g, or t
  misc_feature (97)..(97): n is a, c, g, or t
  misc_feature (267)..(270): n is a, c, g, or t
  misc_feature (272)..(273): n is a, c, g, or t
atcctgatttaaaacagtggaagcatgtataatgaatggatggacaggcgaatgaatggattgacagacggacagacagacggatggangggtgganggatggacagatacagaatgagggaagggacttcaaatgcaagttggatttgtgaaccatcatcatagccaatatgcagatttttaaaaagcattttgaatttcaacctattgtcttcttttccacaccgcttgccgcagaactccctgccagaatgtgaaaaaaaaaannnnannaaaccacagaacaagcgaatgggaaccccaaactggacggcagggtctcaaatccagacctcaggatgcctgctttctaggactcctgctaaccctgcttcagaagctcatgggtgtttccagccacagtcctcaaatagactttcgattttg

SEQ ID NO: 1845 - DNA, 153 bp, Mus musculus
  misc_feature (123)..(125): n is a, c, g, or t
cagttggacctgtcccattgctaggtgctggcaatgattgtatggacttgaattcctatggtgacagctggccagtagcaaggctgccgggctgaccttgggtaccctgggcaagccctgtgnnnctgaccctcagaaatgagcacttgagag

SEQ ID NO: 1846 - DNA, 153 bp, Mus musculus; identical to SEQ ID NO: 1845
  misc_feature (123)..(125): n is a, c, g, or t

SEQ ID NO: 1847 - DNA, 543 bp, Mus musculus
  misc_feature (35)..(35): n is a, c, g, or t
  misc_feature (85)..(85): n is a, c, g, or t
  misc_feature (99)..(99): n is a, c, g, or t
  misc_feature (291)..(291): n is a, c, g, or t
  misc_feature (363)..(363): n is a, c, g, or t
  misc_feature (386)..(386): n is a, c, g, or t
  misc_feature (395)..(395): n is a, c, g, or t
  misc_feature (479)..(479): n is a, c, g, or t
tcccaagagtgcagagggccaaagggagtaacagnctgctggtgcctggggagaggtgcccactaggacagagggaggtggggcnagggagaggtgccngctaggacggagggaggtggggtcagggagtccctctgttccctccagccgcttcctcctggattacaggtgtgtctagttcccagcagaccaccttgtcttgacctactgaagcgttggggactgaggaccgtcctctttctcctgtgttcactttctccagccccacttgggactgaagacccgaaggantgtggctcccttccttccatcccagcctgtttccatgtagcagacccttcctaagggagcaaggaagggaanccacagattgcaaacccaggggntcatttttnattctttctgaaacctttatatcctcagcccaagagacggtgttcccctgcgacctccaagcctggaattgtgcatagcctggntcttgtatctttgtataacggatgttatttgtacgaagggcagttcgtaaacagcacttgttct

SEQ ID NO: 1848 - DNA, 543 bp, Mus musculus; identical to SEQ ID NO: 1847
  misc_feature (35)..(35): n is a, c, g, or t
  misc_feature (85)..(85): n is a, c, g, or t
  misc_feature (99)..(99): n is a, c, g, or t
  misc_feature (291)..(291): n is a, c, g, or t
  misc_feature (363)..(363): n is a, c, g, or t
  misc_feature (386)..(386): n is a, c, g, or t
  misc_feature (395)..(395): n is a, c, g, or t
  misc_feature (479)..(479): n is a, c, g, or t

SEQ ID NO: 1849 - DNA, 516 bp, Mus musculus
  misc_feature (28)..(28): n is a, c, g, or t
  misc_feature (38)..(137): n is a, c, g, or t
  misc_feature (192)..(192): n is a, c, g, or t
  misc_feature (277)..(277): n is a, c, g, or t
  misc_feature (279)..(279): n is a, c, g, or t
  misc_feature (335)..(335): n is a, c, g, or t
  misc_feature (347)..(347): n is a, c, g, or t
  misc_feature (352)..(352): n is a, c, g, or t
  misc_feature (354)..(354): n is a, c, g, or t
  misc_feature (377)..(377): n is a, c, g, or t
  misc_feature (432)..(432): n is a, c, g, or t
  misc_feature (491)..(491): n is a, c, g, or t
cagtccgagcggtgcactggcgtctgcngagccagctnnnnnnnnnnnnnnnnnnnnnnnnnnnnnnnnnnnnnnnnnnnnnnnnnnnnnnnnnnnnnnnnnnnnnnnnnnnnnnnnnnnnnnnnnnnnnnnnnnnncaccgcgtctctgctccctcggaggcccaagccctgggaagatgcgggctcggcngcctcaccctgcaccatcgccctagacacgaggacgcagcctccgaccatcgaggagcgatcccggggcagtccagccgcccaantngacggaggcccaagggtttcctgatgctcgaggtgtttcccgagggcatgactggntcctacacaaanttgantntggacacttgccacctgtgggantcaatgttgcctagtaattttgtttttggatgccaaatttcaacttcatactgtntcctagtccatttgtgtaacggaaataagtttcccttgtcactgtaggacagcacaacntcctggacccgcttgttctgatgat

SEQ ID NO: 1850 - DNA, 516 bp, Mus musculus; identical to SEQ ID NO: 1849
  misc_feature (28)..(28): n is a, c, g, or t
  misc_feature (38)..(137): n is a, c, g, or t
  misc_feature (192)..(192): n is a, c, g, or t
  misc_feature (277)..(277): n is a, c, g, or t
  misc_feature (279)..(279): n is a, c, g, or t
  misc_feature (335)..(335): n is a, c, g, or t
  misc_feature (347)..(347): n is a, c, g, or t
  misc_feature (352)..(352): n is a, c, g, or t
  misc_feature (354)..(354): n is a, c, g, or t
  misc_feature (377)..(377): n is a, c, g, or t
  misc_feature (432)..(432): n is a, c, g, or t
  misc_feature (491)..(491): n is a, c, g, or t

SEQ ID NO: 1851 - DNA, 290 bp, Mus musculus
gggcttctgtcctggctctggccaacccaccataccattgggtgcacctccttccctccctccacatccgttacccttgcccaggtaaattatttgatgtttcctcaagaatggttccaaacttagggtaactgctaggtgtctttgctgggctttcttcctgggacctcctggtagtattgagtgggtgagtatgagcttgggccaggtcatagggcaaaggtcatcatgagctctctgtaagagtaccatggctcattcacacccctgtcttcagctatatagaacag

SEQ ID NO: 1852 - DNA, 290 bp, Mus musculus; identical to SEQ ID NO: 1851

SEQ ID NO: 1853 - DNA, 382 bp, Mus musculus
  misc_feature (34)..(62): n is a, c, g, or t
  misc_feature (304)..(304): n is a, c, g, or t
  misc_feature (306)..(306): n is a, c, g, or t
  misc_feature (353)..(353): n is a, c, g, or t
  misc_feature (355)..(355): n is a, c, g, or t
  misc_feature (357)..(357): n is a, c, g, or t
tgaagcaaggaatcccacctggcccaggcaccgnnnnnnnnnnnnnnnnnnnnnnnnnnnnngcctgttggggtgtagttgttctggtagaccccaaagggaagagccacccagttatttgaaaataccagcagttcattgttgtctatcatcactggcttctgggcagacagaacaagcgttgggttggtggatattcgttgcacacacggccaaggatgtacttaactgtaaggacataccgagaagattgtgaagatatgagctgtcattctttggccatggatgcttacggtttaccccntntcagattataaagagacaaataaaccccttggaagcaaacatggttntntntcttgtccagggaggttatgtgctg

SEQ ID NO: 1854 - DNA, 382 bp, Mus musculus; identical to SEQ ID NO: 1853
  misc_feature (34)..(62): n is a, c, g, or t
  misc_feature (304)..(304): n is a, c, g, or t
  misc_feature (306)..(306): n is a, c, g, or t
  misc_feature (353)..(353): n is a, c, g, or t
  misc_feature (355)..(355): n is a, c, g, or t
  misc_feature (357)..(357): n is a, c, g, or t

SEQ ID NO: 1855 - DNA, 351 bp, Mus musculus
ccaaagaatccatggattggtggatgtgagggcatcacccatccatctctggaacctagcctagcttggagagtgaccttataagcaaactgaagcatgtaaattcatcaggcgtgagggaactggaggtgtcaaggaaaggaagctaggaccttggggcttcctgagctggggttatctgtaatctgggtcacctcagacttgtcatcaagcctctggaagaccccgttcacacatttaggaataggcatcatagctacctcatgattcattttaaaatctttaacaccccttcccctctttcttttccagtacctgggactcaaacccatggccttaggtctggtagag

SEQ ID NO: 1856 - DNA, 351 bp, Mus musculus; identical to SEQ ID NO: 1855

SEQ ID NO: 1857 - DNA, 272 bp, Mus musculus
gacttgctggagtccctcgaggaagaaggccaactttaatcccttagagggagatgggagttaatttataaaacacacaacactagctgctatcaggttccaggtacagcgcagtgcgttacctaagcaactgataacggcttgattcctccaaatgagtgctagggagacgatgatataagatgggggccagaattcaaaatgaaaaaccactgggctaagagaaaaattaattattagggtagggggctacttgccctagatgctaggta

SEQ ID NO: 1858 - DNA, 272 bp, Mus musculus; identical to SEQ ID NO: 1857

SEQ ID NO: 1859 - DNA, 436 bp, Mus musculus
  misc_feature (153)..(153): n is a, c, g, or t
tcgggtcacgcctgctctcggcaggcggtccaggccggctggctcccttgtgaccgactgcactgcctgagtcttgcaggcgacactgggcgttccctccctttccggccttggacagttttgttttggatcttacttcccagtcaaggagangctccctgttgaccaaaggtttcccagtctccttggggtggccggctgccaagtttccttagtcccagtctgccaggacctgggactgctggagatcctagaaggccaggacgctggacgcgagggggcgtggccctattagctccgccccccgggcctgcgggtagctcgactcccgccagccccggaggctcgcgcagactaagctctgtaccattccttgcgaacgctcggacccggacaggctgcgcgcacgcgcactcgggagcgacagtcaggctct

SEQ ID NO: 1860 - DNA, 436 bp, Mus musculus; identical to SEQ ID NO: 1859
  misc_feature (153)..(153): n is a, c, g, or t

SEQ ID NO: 1861 - DNA, 463 bp, Mus musculus
  misc_feature (29)..(29): n is a, c, g, or t
  misc_feature (117)..(117): n is a, c, g, or t
  misc_feature (368)..(368): n is a, c, g, or t
  misc_feature (373)..(373): n is a, c, g, or t
tgctagcggctttggcacagccggctccntgagtctgtagactccgcacagcacggcccgtctggctctaacatccgatttgccatcgtaggtcacagggctcatcagataccgganaccttcagcacggtgatcagacaggaacaccaaaccgtgacactatttagttcttaaaaaaataaattggggcagccttgccagagagccccccgcctggtgacagtgtggcagggagaagtccatcacactggaagacaggacgctgggcagagccaccaccggcagcctgtggagacactccctacgcttatatattgaactttatattttgtaagagtttttcctcctctttaactttttaaaaaaanaaaanaaaaaacaaatgtaaagtagatgggaaggaaagtgaagcttcacacagcctttatatgtggtgcgcgtcttgtggggatctccagtctgg

SEQ ID NO: 1862 - DNA, 463 bp, Mus musculus; identical to SEQ ID NO: 1861
  misc_feature (29)..(29): n is a, c, g, or t
  misc_feature (117)..(117): n is a, c, g, or t
  misc_feature (368)..(368): n is a, c, g, or t
  misc_feature (373)..(373): n is a, c, g, or t

SEQ ID NO: 1863 - DNA, 442 bp, Mus musculus
  misc_feature (86)..(86): n is a, c, g, or t
ccccgacagtatgaatggttcttcatgaagatgtgggtagaacacatctggcttcagaaatggtatggaggtgtatctgacatccngagggaggaatacttcaaggcagctccaaggaaggcctgatagtaacacaaaagtcttggggtttgcatcaaaatgaagacctttgaagtaaagaagccagacagtctctgactgccgtctctttgtttgaagggtgcccagctgccctgtcaccctacagcagaatgagaaaagatgaacagggagccttgggctagagttgagattcatcggagtggtcctttgccgacccatcatctacacaggcactcatagagacgtttctgtttatgccgtacgccgtactcaatccagacacacccatttggaaatcttggttgtcaaaatggaagtggtagttgctaatcctgtcctt

SEQ ID NO: 1864 - DNA, 442 bp, Mus musculus; identical to SEQ ID NO: 1863
  misc_feature (86)..(86): n is a, c, g, or t

SEQ ID NO: 1865 - DNA, 345 bp, Mus musculus
gaatgggatctcatttctctccatttcctgctttctataaataatccgattgagaacatacagaaccactctctctccaagagtgctcacctgcttcagcccctctctagaaggttcagaggttttcacaatatcatcaatggcccaccactgaccaacaaggtaaagtgccacagctgtaagagaatcttcaggcgcaaagagagcaagaattttctgtgtctgattgccgccatagagagggacaaagcccacatttgacagactaacgggaatcgtaatgttgagactagaaaagcactctggatgttcagggtccccacaccttaggctggagaggtaatc

SEQ ID NO: 1866 - DNA, 345 bp, Mus musculus; identical to SEQ ID NO: 1865

SEQ ID NO: 1867 - DNA, 533 bp, Mus musculus
  misc_feature (164)..(164): n is a, c, g, or t
  misc_feature (189)..(189): n is a, c, g, or t
  misc_feature (414)..(414): n is a, c, g, or t
  misc_feature (436)..(437): n is a, c, g, or t
  misc_feature (439)..(439): n is a, c, g, or t
  misc_feature (441)..(441): n is a, c, g, or t
gagtttgaaacatgcctgctttggagagactggggcagtgaacaccccagcagcctttcagcaaattggctttggacatggacccttctcagcctgtaccaagtactgcagctcagtgtcatgagcatcctttggagcaggtcaacctgaggctcctttggctnacatctaagttgtccaggtgctcangctcctgtgtgcctggatgatgagagggctctagggctctttcagtcagagacttacattgaggtggggtgagggtcagagaaagttctggtgcttttcctgtgctctaagagctgagagccagaaatgcagattcaatttggaaggagatgggatagctgaagaacttaccacgtccatgactgtgccctgactcaagaccgtatcatgtggtggctttatttntacacttcttgcccaccatggnngncntgaagaagctgttctccagccacaacaaccacagaaagcccctcgctctcccctctctgttttcccattaatcaaagccatgtctagaatgg

SEQ ID NO: 1868 - DNA, 533 bp, Mus musculus; identical to SEQ ID NO: 1867
  misc_feature (164)..(164): n is a, c, g, or t
  misc_feature (189)..(189): n is a, c, g, or t
  misc_feature (414)..(414): n is a, c, g, or t
  misc_feature (436)..(437): n is a, c, g, or t
  misc_feature (439)..(439): n is a, c, g, or t
  misc_feature (441)..(441): n is a, c, g, or t

SEQ ID NO: 1869 - DNA, 413 bp, Mus musculus
  misc_feature (342)..(342): n is a, c, g, or t
  misc_feature (361)..(362): n is a, c, g, or t
  misc_feature (364)..(364): n is a, c, g, or t
  misc_feature (366)..(373): n is a, c, g, or t
  misc_feature (377)..(377): n is a, c, g, or t
  misc_feature (379)..(379): n is a, c, g, or t
ctcactcttgcctggcagccaggtgtcccttggccttcccacatccccaagggctcttgcccacagaccagaaaatcttgctcttggcatcttgaccttggctttttgggtcccaactctgagtcagagggtacaggagaggatggtcagaaatgagtcctttggggttaattctctctcaccaactcttaaagacacggctggcattcccaagcccatcactctcttgcatcctgaagcttggcaataggcagagctgttattttaaacgccaacactggtttccccacccatatcctcctaaggaggagtgttggttagtgaacacttctggctccaagncaatccatcttccttaaannanannnnnnnnaaanancgtttctcttttttcgtcctgaccattgtaaagg

SEQ ID NO: 1870 - DNA, 413 bp, Mus musculus; identical to SEQ ID NO: 1869
  misc_feature (342)..(342): n is a, c, g, or t
  misc_feature (361)..(362): n is a, c, g, or t
  misc_feature (364)..(364): n is a, c, g, or t
  misc_feature (366)..(373): n is a, c, g, or t
  misc_feature (377)..(377): n is a, c, g, or t
  misc_feature (379)..(379): n is a, c, g, or t

SEQ ID NO: 1871 - DNA, 509 bp, Mus musculus
  misc_feature (235)..(235): n is a, c, g, or t
  misc_feature (336)..(337): n is a, c, g, or t
  misc_feature (446)..(451): n is a, c, g, or t
  misc_feature (453)..(456): n is a, c, g, or t
  misc_feature (458)..(461): n is a, c, g, or t
  misc_feature (464)..(468): n is a, c, g, or t
  misc_feature (472)..(472): n is a, c, g, or t
  misc_feature (474)..(478): n is a, c, g, or t
tgtacaagtgttgttttcttcctaactttgtggaattggccatgtgtatcagttgattagtacattatttttatagtacttaaaagtaaagatttaaaaaaatttttgatgatggagaattttgataaatcctgatgttgacttaactgaagttggtaaatgtgttttctatagctaagaattttctaattctaggaaaccatgatggaatcactattgattgaaaccatgggancagattatttgtagacaaattctgacttgttttgggtgtcatcagtgctagatgaaacacatctatgggacatgtcattgacactttgtaaagtattaatnnccatagcaattattgttcagacaagtaactgagtccgatagcccctttcctgattttggttttggatttctattatgaaatcaaggattagaaggataatcaatgattnnnnnntnnnnannnnaannnnnaaanannnnncctttagtattgggcatggactctagtaaac

SEQ ID NO: 1872 - DNA, 509 bp, Mus musculus; identical to SEQ ID NO: 1871
  misc_feature (235)..(235): n is a, c, g, or t
  misc_feature (336)..(337): n is a, c, g, or t
  misc_feature (446)..(451): n is a, c, g, or t
  misc_feature (453)..(456): n is a, c, g, or t
  misc_feature (458)..(461): n is a, c, g, or t
  misc_feature (464)..(468): n is a, c, g, or t
  misc_feature (472)..(472): n is a, c, g, or t
  misc_feature (474)..(478): n is a, c, g, or t

SEQ ID NO: 1873 - DNA, 184 bp, Mus musculus
atgttacttgggttagatcaccgagactaaactattatttatccctgtataatatttatttttttaacctctgtctcatttatctgtaataaactgattttatggaagatgtaatttattgtataaagactacaggggcatttgttgtatagagaatcatgtcggtcaacaaattgtcctgctg

SEQ ID NO: 1874 - DNA, 184 bp, Mus musculus; identical to SEQ ID NO: 1873

SEQ ID NO: 1875 - DNA, 245 bp, Mus musculus
  misc_feature (102)..(116): n is a, c, g, or t
gaaatacaatcagtgtgcttagctttaaggtgggaagatttgtgatggtggaaagatgttgcaaggaatttgttatagaaatcttcaaggagatgtatgaannnnnnnnnnnnnnncttgactgttttcctctgatcaattacatcttagcaggtggcccaggcaagacatagatgcaaatattaatacccagtgtttaccaccattattcaaatgcaagtgaccatgtttaatatcttgcttga

SEQ ID NO: 1876 - DNA, 245 bp, Mus musculus; identical to SEQ ID NO: 1875
  misc_feature (102)..(116): n is a, c, g, or t

SEQ ID NO: 1877 - DNA, 557 bp, Mus musculus
  misc_feature (158)..(160): n is a, c, g, or t
  misc_feature (162)..(162): n is a, c, g, or t
  misc_feature (165)..(165): n is a, c, g, or t
  misc_feature (171)..(185): n is a, c, g, or t
  misc_feature (188)..(206): n is a, c, g, or t
  misc_feature (394)..(432): n is a, c, g, or t
ggctgccatggctcagttccctgaccctggagccctgaacctggcttcagagtagcaaagagtttcctccaagatgctgtaagggaagtctttgcataggaaaagggcggctggctcattttattttatctttctttacactgaatcccaaaatcatnnnancanaaaggnnnnnnnnnnnnnnntannnnnnnnnnnnnnnnnnncatgccatctctctggtttctcacctcagtcatgtcccagaattgtcagatccagtggcatctgtgctcttgctgcacatctttctatttcaactggctggcacatcaagtgttaactctggcttctgggccaagttagaaataaccagtctatttcccctttattttatttaattttatttcatttnnnnnnnnnnnnnnnnnnnnnnnnnnnnnnnnnnnnnnntgtttattagccttgtgtgtcactcatgtgtggacccacccacatttccttctcctcccctcttcagccaggctatgataacactaaaggattattaatgcttgggttccgcatctcatttaaag

SEQ ID NO: 1878 - DNA, 557 bp, Mus musculus; identical to SEQ ID NO: 1877
  misc_feature (158)..(160): n is a, c, g, or t
  misc_feature (162)..(162): n is a, c, g, or t
  misc_feature (165)..(165): n is a, c, g, or t
  misc_feature (171)..(185): n is a, c, g, or t
  misc_feature (188)..(206): n is a, c, g, or t
  misc_feature (394)..(432): n is a, c, g, or t

SEQ ID NO: 1879 - DNA, 448 bp, Mus musculus
  misc_feature (51)..(51): n is a, c, g, or t
  misc_feature (54)..(54): n is a, c, g, or t
  misc_feature (94)..(110): n is a, c, g, or t
  misc_feature (210)..(234): n is a, c, g, or t
  misc_feature (243)..(288): n is a, c, g, or t
  misc_feature (360)..(397): n is a, c, g, or t
  misc_feature (416)..(416): n is a, c, g, or t
gcccgggtggaagctgagttacaccaactgctgttagcttcgggccgtgcnatngtgctctggaccacagacatctatggccggctagctgcannnnnnnnnnnnnnnnnatctccagggtcgtagtgaagcctgacacaaaggctctgtcttaggttttctgcagtttgcctttctcctgggtataccttgagtcacttctgctttctnnnnnnnnnnnnnnnnnnnnnnnnnatctggcannnnnnnnnnnnnnnnnnnnnnnnnnnnnnnnnnnnnnnnnnnnnncttgttggctctgttgggttgtagtctctctgtagaaaacgcttcctggacacatcccatgccctaagcagnnnnnnnnnnnnnnnnnnnnnnnnnnnnnnnnnnnnnnttcagggcattttggggtnttacattgtgtaccctgcctggcaccctatta

SEQ ID NO: 1880 - DNA, 448 bp, Mus musculus; identical to SEQ ID NO: 1879
  misc_feature (51)..(51): n is a, c, g, or t
  misc_feature (54)..(54): n is a, c, g, or t
  misc_feature (94)..(110): n is a, c, g, or t
  misc_feature (210)..(234): n is a, c, g, or t
  misc_feature (243)..(288): n is a, c, g, or t
  misc_feature (360)..(397): n is a, c, g, or t
  misc_feature (416)..(416): n is a, c, g, or t

SEQ ID NO: 1881 - DNA, 567 bp, Mus musculus
  misc_feature (33)..(33): n is a, c, g, or t
  misc_feature (40)..(40): n is a, c, g, or t
  misc_feature (55)..(55): n is a, c, g, or t
  misc_feature (58)..(58): n is a, c, g, or t
  misc_feature (62)..(62): n is a, c, g, or t
  misc_feature (65)..(65): n is a, c, g, or t
  misc_feature (78)..(79): n is a, c, g, or t
  misc_feature (81)..(81): n is a, c, g, or t
  misc_feature (83)..(83): n is a, c, g, or t
  misc_feature (85)..(85): n is a, c, g, or t
  misc_feature (87)..(106): n is a, c, g, or t
  misc_feature (110)..(110): n is a, c, g, or t
  misc_feature (119)..(119): n is a, c, g, or t
  misc_feature (121)..(121): n is a, c, g, or t
  misc_feature (131)..(131): n is a, c, g, or t
  misc_feature (133)..(133): n is a, c, g, or t
  misc_feature (141)..(141): n is a, c, g, or t
  misc_feature (143)..(143): n is a, c, g, or t
  misc_feature (232)..(232): n is a, c, g, or t
  misc_feature (247)..(247): n is a, c, g, or t
  misc_feature (249)..(249): n is a, c, g, or t
  misc_feature (279)..(279): n is a, c, g, or t
  misc_feature (306)..(306): n is a, c, g, or t
  misc_feature (356)..(357): n is a, c, g, or t
  misc_feature (359)..(359): n is a, c, g, or t
ggtcgtacaagtggtacttaccaatattatttnaaggaantcctatgattaaacntcntatnatntccagaatacatnncntnantnnnnnnnnnnnnnnnnnnnnatgnattgcagantnttgcagatcntntcattcantnttccaggataaggtgtgtgataagacaccacatacctaagaagggaacgtaatttttttggtatcatgtaattgcactggatatgtttntggtaaggagttttntntagtaggattcaactttttgtgtgtgtgantgtattacaaatgagaacttcactcgnataaactgattttgttacagtctatgcttcctgtaacaaagcgagacaannantgcatttgatctataagttgaaataagtcctcttggggaatgccttctgtctacacctgaggagaatgagtgtcttctgtccacactagatgaaggcctacatacactgtgggagggagcagtaggttaattaaagagtaagctgagcatgctcatttggtctttgtcagctccatcttttcatgttcagaccataaacagtgataat

SEQ ID NO: 1882 - DNA, 567 bp, Mus musculus; identical to SEQ ID NO: 1881
  misc_feature (33)..(33): n is a, c, g, or t
  misc_feature (40)..(40): n is a, c, g, or t
  misc_feature (55)..(55): n is a, c, g, or t
  misc_feature (58)..(58): n is a, c, g, or t
  misc_feature (62)..(62): n is a, c, g, or t
  misc_feature (65)..(65): n is a, c, g, or t
  misc_feature (78)..(79): n is a, c, g, or t
  misc_feature (81)..(81): n is a, c, g, or t
  misc_feature (83)..(83): n is a, c, g, or t
  misc_feature (85)..(85): n is a, c, g, or t
  misc_feature (87)..(106): n is a, c, g, or t
  misc_feature (110)..(110): n is a, c, g, or t
  misc_feature (119)..(119): n is a, c, g, or t
  misc_feature (121)..(121): n is a, c, g, or t
  misc_feature (131)..(131): n is a, c, g, or t
  misc_feature (133)..(133): n is a, c, g, or t
  misc_feature (141)..(141): n is a, c, g, or t
  misc_feature (143)..(143): n is a, c, g, or t
  misc_feature (232)..(232): n is a, c, g, or t
  misc_feature (247)..(247): n is a, c, g, or t
  misc_feature (249)..(249): n is a, c, g, or t
  misc_feature (279)..(279): n is a, c, g, or t
  misc_feature (306)..(306): n is a, c, g, or t
  misc_feature (356)..(357): n is a, c, g, or t
  misc_feature (359)..(359): n is a, c, g, or t

SEQ ID NO: 1883 - DNA, 477 bp, Mus musculus
  misc_feature (39)..(39): n is a, c, g, or t
  misc_feature (84)..(84): n is a, c, g, or t
  misc_feature (102)..(106): n is a, c, g, or t
  misc_feature (108)..(109): n is a, c, g, or t
  misc_feature (112)..(115): n is a, c, g, or t
  misc_feature (118)..(120): n is a, c, g, or t
  misc_feature (244)..(244): n is a, c, g, or t
  misc_feature (348)..(348): n is a, c, g, or t
  misc_feature (355)..(355): n is a, c, g, or t
  misc_feature (357)..(357): n is a, c, g, or t
  misc_feature (360)..(361): n is a, c, g, or t
  misc_feature (368)..(368): n is a, c, g, or t
  misc_feature (370)..(370): n is a, c, g, or t
gaaatgtctccatcaaacctgcagcttttcacattcacntaaaagcagtacgtaaacctagacccgtgaaggcaggcctgtggntctccagcctcagaatcnnnnntnnttnnnnggnnnagggtcctgaacctaatcccttccagactctgggtctgcagtcgtagtgttggaatgtgagaattccctccaagctgaagtgaccacagaccacagtgtgtggccttaacaatccctgtcaganttccctcagggaagagtgcctgtacttacactctgctctctaggtaagagggttggaggtccacctgccctcggaggctgttgcccttttaacccccacagganggatcananaannaaaaaananagcaggagaggaaccacgaaaaagaagcctcccaaggccaggttctgtgttcctcctcctgtgcaaggctagacttgccaacattcaacattcaagagccaaatgag

SEQ ID NO: 1884 - DNA, 477 bp, Mus musculus; identical to SEQ ID NO: 1883
  misc_feature (39)..(39): n is a, c, g, or t
  misc_feature (84)..(84): n is a, c, g, or t
  misc_feature (102)..(106): n is a, c, g, or t
  misc_feature (108)..(109): n is a, c, g, or t
  misc_feature (112)..(115): n is a, c, g, or t
  misc_feature (118)..(120): n is a, c, g, or t
  misc_feature (244)..(244): n is a, c, g, or t
  misc_feature (348)..(348): n is a, c, g, or t
  misc_feature (355)..(355): n is a, c, g, or t
  misc_feature (357)..(357): n is a, c, g, or t
  misc_feature (360)..(361): n is a, c, g, or t
  misc_feature (368)..(368): n is a, c, g, or t
  misc_feature (370)..(370): n is a, c, g, or t

SEQ ID NO: 1885 - DNA, 516 bp, Mus musculus
  misc_feature (374)..(375): n is a, c, g, or t
ctgaacacagggagccaagccgccagcagtgccagggccttgctgcccacaagccatgctcaggttccacacaagcctagctaaccatatccagaggaaatcgctattctatgtggaggagatcccagcataggcagggacttggctattgctgtttagggacagttgagtgtgactgttggtcatgtggctctgtgtctagctaaggcagtgtgtgtgtgtgcacagtttgtgtgtgtacagctgctttgtcgtctgttcagccctaagcccggaacccgagttatcagggaggagaccgtcgggaatacacggcttaggagttgatgctggacattttccaggcttctgttaaataggaagtcttcttaaannaaaaacaaaaaaacacaaaaaaaaactagtgctttagaaaaaaacgttttcaccaacaagtctatgacttccaagtcatttggtataaatactatcaaatataaaattctaaaaaaacctaacctgggaacggtgagtgag

SEQ ID NO: 1886 - DNA, 516 bp, Mus musculus; identical to SEQ ID NO: 1885
  misc_feature (374)..(375): n is a, c, g, or t

SEQ ID NO: 1887 - DNA, 390 bp, Mus musculus
  misc_feature (57)..(75): n is a, c, g, or t
ctgcccatggaggaagacacagcacaagggcatattgtccatggctgggtacactannnnnnnnnnnnnnnnnnngggatcatgataaaaatagcagtattaatttttttttcttctcagtggtattgtaactaagttattctgtcctgctcctcaccttggaagggaagacccagcacagagcctttgggaacagcagctctatggggtgttgtactgggagagggcactgtcaagaagggtggaggggcaggaagagagaagagcaatgtctaccctggtgagcttttttgtttttatgacaaagacgactcgatatgcttccccttaggaatggagatataggtaagtggagtcaggcagtaggtaccaaattaagctgctgcttgg

SEQ ID NO: 1888 - DNA, 390 bp, Mus musculus; identical to SEQ ID NO: 1887
  misc_feature (57)..(75): n is a, c, g, or t

SEQ ID NO: 1889 - DNA, 384 bp, Mus musculus
  misc_feature (119)..(146): n is a, c, g, or t
  misc_feature (310)..(310): n is a, c, g, or t
tgcatgagcgagagatccctctgaaatacaagatgaaaatcaagtgccgtttccagaaggcctaccggagagctttggagcacgaggaggaggcgctgtccctgggcagtgtgcacgannnnnnnnnnnnnnnnnnnnnnnnnnnngaagcaagctgagggctccttgactgtgtatgtgatctcggagcactcctcccttcttccccaggacatgatgagctacattgggcctgagaggacggcagttgtccgggggctgatccacagggaagccttcaacatcatcggccgtcgcatagtccaggtcncccaggccatgtccttgacggaggatgtgcttgctgctgccttggccgaccacctgcccgaggacaagtggagc

SEQ ID NO: 1890 - DNA, 384 bp, Mus musculus; identical to SEQ ID NO: 1889
  misc_feature (119)..(146): n is a, c, g, or t
  misc_feature (310)..(310): n is a, c, g, or t

SEQ ID NO: 1891 - DNA, 499 bp, Mus musculus
  misc_feature (222)..(237): n is a, c, g, or t
gaagagcgaagttcccgagagacccaataactgctatgcggggcccagtggcctgggcacaggcggcctggacatcagcaaaagtctcatccgcaacgctgctggggaagctgggcttcctgtcactcctggttctggaccctggggttcggctgcatcgctgggtcgcggtcgtccaggtggccagaggatgtcccggggcagtgtggggcccgcaccgtnnnnnnnnnnnnnnnntctgcggccaccgtcacctatcaatttgagccgcagcatcgacgccgcgctcttccgggagcacttggttcgagagagtgtgttccaacgctgtggtctccgtggcttggcctcctcgccgacagggggcgccctgcggcctcgccgcggcagccagcccgatgccgagctcgacggcgcgggcacatcattgctccgaggccgctgccgctcgctcaccgaggtgtgcttgcgcacgtcgctcccgcagcacgtgatggag

SEQ ID NO: 1892 - DNA, 499 bp, Mus musculus; identical to SEQ ID NO: 1891
  misc_feature (222)..(237): n is a, c, g, or t

SEQ ID NO: 1893 - DNA, 357 bp, Mus musculus
  misc_feature (33)..(36): n is a, c, g, or t
  misc_feature (97)..(97): n is a, c, g, or t
  misc_feature (252)..(252): n is a, c, g, or t
tgttgagacaagtgtgcaggcacagctgtaatnnnngcaggccaaccgacacttggagggcagctttggcctagacagaagccaagtcaggtgctcntgggaaacttcttagtcggtgatcttggtactacgagctctgagtgtgttccattatttcagtttttgaagtgtgctttgtgagtccccttttctggtttataaccatctctcctgcctggtatgtttctcgaggtgtgcttcatggcggacagntctagttgtgtaaactgacatcatccttcactgcaattccgtaatctcaagtcaatctgggaactccgtagtttgttttgttttcaagtttggagaggaagcctc

SEQ ID NO: 1894 - DNA, 357 bp, Mus musculus; identical to SEQ ID NO: 1893
  misc_feature (33)..(36): n is a, c, g, or t
  misc_feature (97)..(97): n is a, c, g, or t
  misc_feature (252)..(252): n is a, c, g, or t

SEQ ID NO: 1895 - DNA, 536 bp, Mus musculus
  misc_feature (466)..(481): n is a, c, g, or t
gttcacacttgtcagcgatttatttttttttaaagggggagggtcctggaggtgaaggtagaaggtaaaaagggagaaactgaaaattgagtgcaagtgtaaaccaacccaaaatacaaacacagggggcggggttgggggtgggattctgatgcaattatacaggcagggtactttaaaaaaaaaaaaaaaccaacaacaaccaaaattccaaccttgtagcgtgggtctgagttatagtttatataaaaattaaaaactgtataaggtttcttcactaaattctacaggactatcggatacctagcatatgcttacaaagtctgccccttctcctttcccagttctagggcccaaaccccaaccagagcctgactcacaggagaccatctcccccacctaatgcctagaccgttcagctctgtggctttggggacagcaagcccaggttcccactgtctagtcnnnnnnnnnnnnnnnncgtgggagtgtgggggagttgttattctcaaacatttgcagcttgaaacagttga

SEQ ID NO: 1896 - DNA, 536 bp, Mus musculus; identical to SEQ ID NO: 1895
  misc_feature (466)..(481): n is a, c, g, or t

SEQ ID NO: 1897 - DNA, 538 bp, Mus musculus
  misc_feature (26)..(26): n is a, c, g, or t
  misc_feature (36)..(36): n is a, c, g, or t
  misc_feature (54)..(55): n is a, c, g, or t
  misc_feature (65)..(65): n is a, c, g, or t
  misc_feature (71)..(111): n is a, c, g, or t
  misc_feature (148)..(148): n is a, c, g, or t
  misc_feature (155)..(155): n is a, c, g, or t
  misc_feature (159)..(160): n is a, c, g, or t
  misc_feature (254)..(255): n is a, c, g, or t
  misc_feature (257)..(263): n is a, c, g, or t
  misc_feature (438)..(438): n is a, c, g, or t
  misc_feature (443)..(465): n is a, c, g, or t
aacgtcatatgctgcgacacacgggncgagaagccnttccgctgtgccacctgnncctataccanaggccnnnnnnnnnnnnnnnnnnnnnnnnnnnnnnnnnnnnnnnnntggtggagcaggagggcctggtctctctgcccctganggctggncccnncctcatagcccaccctctgttttgagcactcggggtccagcagccctgggtgctactggtagcagggctcttcattcagactcaccttgaactnncnnnnnnnttttacctggggctctaggaattagccctatgcctcctgcattttatacaaatgaactagaaaccacctttccctttctcccccgctggtcaggggctccacacagactaacctaggcactatatggaccagcctgaatcccatggtcagggggccatatagaccaggggacttntcttnnnnnnnnnnnnnnnnnnnnnnngtgattagggccttggattcaccgccactgctcccagaggctatggatgaactggttgggagctgcccagcct

SEQ ID NO: 1898 - DNA, 538 bp, Mus musculus; identical to SEQ ID NO: 1897
  misc_feature (26)..(26): n is a, c, g, or t
  misc_feature (36)..(36): n is a, c, g, or t
  misc_feature (54)..(55): n is a, c, g, or t
  misc_feature (65)..(65): n is a, c, g, or t
  misc_feature (71)..(111): n is a, c, g, or t
  misc_feature (148)..(148): n is a, c, g, or t
  misc_feature (155)..(155): n is a, c, g, or t
  misc_feature (159)..(160): n is a, c, g, or t
  misc_feature (254)..(255): n is a, c, g, or t
  misc_feature (257)..(263): n is a, c, g, or t
  misc_feature (438)..(438): n is a, c, g, or t
  misc_feature (443)..(465): n is a, c, g, or t

SEQ ID NO: 1899 - DNA, 545 bp, Mus musculus
  misc_feature (28)..(44): n is a, c, g, or t
  misc_feature (91)..(91): n is a, c, g, or t
  misc_feature (113)..(113): n is a, c, g, or t
  misc_feature (154)..(154): n is a, c, g, or t
  misc_feature (236)..(239): n is a, c, g, or t
  misc_feature (242)..(242): n is a, c, g, or t
  misc_feature (341)..(342): n is a, c, g, or t
  misc_feature (438)..(440): n is a, c, g, or t
  misc_feature (446)..(446): n is a, c, g, or t
  misc_feature (452)..(453): n is a, c, g, or t
  misc_feature (459)..(481): n is a, c, g, or t
tctaccagagggacccaagctgaaggcnnnnnnnnnnnnnnnnnggaggggctttcgggatcttccttccacagcaacaaaatcccttggntcctttgcgcttgcggcgctcntgagccttggcccgggccgtgactcctacagcctgggcggntcccctaggacgcggctaaaacttggccaaaaggcggtactcaactcacacgccggaaggaaaactgcattaaaaaaaaaannnnaanaacaacaacagcaacacacatacacacacacacacacacacacacacacacacacacacacacacacacaacgaaaactccgctgagccgcagcgcgcnntctcacagaagtattactttttctattgttattttatacgttttctttactccccctccctcccctgaccatataagcttgtaaagtcttgactgnnnggagangggggnnaaagannnnnnnnnnnnnnnnnnnnnnnaatttccagtcccccttcctttccctatccctacaccggggaccctgcgaaaatgtaatccttg

SEQ ID NO: 1900 - DNA, 545 bp, Mus musculus; identical to SEQ ID NO: 1899
  misc_feature (28)..(44): n is a, c, g, or t
  misc_feature (91)..(91): n is a, c, g, or t
  misc_feature (113)..(113): n is a, c, g, or t
  misc_feature (154)..(154): n is a, c, g, or t
  misc_feature (236)..(239): n is a, c, g, or t
  misc_feature (242)..(242): n is a, c, g, or t
  misc_feature (341)..(342): n is a, c, g, or t
  misc_feature (438)..(440): n is a, c, g, or t
  misc_feature (446)..(446): n is a, c, g, or t
  misc_feature (452)..(453): n is a, c, g, or t
  misc_feature (459)..(481): n is a, c, g, or t

SEQ ID NO: 1901 - DNA, 622 bp, Mus musculus
  misc_feature (96)..(97): n is a, c, g, or t
  misc_feature (99)..(99): n is a, c, g, or t
  misc_feature (101)..(105): n is a, c, g, or t
  misc_feature (107)..(117): n is a, c, g, or t
  misc_feature (121)..(121): n is a, c, g, or t
  misc_feature (123)..(124): n is a, c, g, or t
  misc_feature (126)..(127): n is a, c, g, or t
  misc_feature (129)..(132): n is a, c, g, or t
  misc_feature (473)..(490): n is a, c, g, or t
  misc_feature (588)..(588): n is a, c, g, or t
gtgaggtccacctgcggcgtttcaacctgcggcgttcggcgctcgaactcttcttcattgaccagtccaactacttcctcaacttcccacacaagnngncnnnnncnnnnnnnnnnncccntnncnngnnnnccaggccccagctctaccctatcccatcccacacccagctacggaaccaggtgtactcattgcttctgcgcctaaggccacccacccaaggctacctaagcagccgctccccactggagatgcttcgtgcctcgggacttacccagaaatgggtacagcgagagatatccaactttgagtacctcatgcaactcaacacaatcgcagggcgcacctataatgacctgtctcagtaccctgtgttcccctgggtcttgcaggactatgtgtccccagtcttggacctcagcaatccagctgtcttccgggacctgtccaaacccatcggtgtggtgaatccnnnnnnnnnnnnnnnnnngagggagaaatatgagagctttgaggacccagcaggcacaatcgacaagttccactatggcacacactattctaacgcagcgggcgtgatgcactacntcatccgcgtggagcccttcacgtccctgcatgt

SEQ ID NO: 1902 - DNA, 622 bp, Mus musculus; identical to SEQ ID NO: 1901
  misc_feature (96)..(97): n is a, c, g, or t
  misc_feature (99)..(99): n is a, c, g, or t
  misc_feature (101)..(105): n is a, c, g, or t
  misc_feature (107)..(117): n is a, c, g, or t
  misc_feature (121)..(121): n is a, c, g, or t
  misc_feature (123)..(124): n is a, c, g, or t
  misc_feature (126)..(127): n is a, c, g, or t
  misc_feature (129)..(132): n is a, c, g, or t
  misc_feature (473)..(490): n is a, c, g, or t
  misc_feature (588)..(588): n is a, c, g, or t

SEQ ID NO: 1903 - DNA, 245 bp, Mus musculus
  misc_feature (137)..(154): n is a, c, g, or t
cagggcgcacctataatgacctgtctcagtaccctgtgttcccctgggtcttgcaggactatgtgtccccagtcttggacctcagcaatccagctgtcttccgggacctgtccaaacccatcggtgtggtgaatccnnnnnnnnnnnnnnnnnngagggagaaatatgagagctttgaggacccagcaggcacaatcgacaagttccactatggcacacactattctaacgcagcgggcgtgatg

SEQ ID NO: 1904 - DNA, 245 bp, Mus musculus; identical to SEQ ID NO: 1903
  misc_feature (137)..(154): n is a, c, g, or t

SEQ ID NO: 1905 - DNA, 446 bp, Mus musculus
  misc_feature (27)..(27): n is a, c, g, or t
  misc_feature (53)..(53): n is a, c, g, or t
  misc_feature (142)..(142): n is a, c, g, or t
gacaaatcatgtgcttgaacagaaaanaaataaaaaataaaaaaaatattganaacacagcacttaggttggcttagctgcagcctcctcagaggtcagattatttatttaaaattactggttgcatcaagaacccataggntgtacaaacggttctatacaatctgcatcgtagagacaaagaggcagggaaatccatgtcacaagggtaaagctccccgtgtacaggctgggaatgccaggtaggctaggaaaacccgctcgctcttcagagaagtgccatcagggtgctgggaacatgcatggtgctttcggacattagccttgttcaacacatttctcgtattgacagatctatagtgtgcatgggcagacacatgctgcctctgtgtctcttaaaattttaattaaaagtactctttccagtaatcctaatttgcacgaag

SEQ ID NO: 1906 - DNA, 446 bp, Mus musculus; identical to SEQ ID NO: 1905
  misc_feature (27)..(27): n is a, c, g, or t
  misc_feature (53)..(53): n is a, c, g, or t
  misc_feature (142)..(142): n is a, c, g, or t

SEQ ID NO: 1907 - DNA, 289 bp, Mus musculus
gtgggtcccatgtccccagcaggcaggcaccttcagtccgtcttaacctcaccctccaaatgttcaacggcagaagggtttttatgattttaaattattactgctttgaaataaatggacgtttgagccacgtgcggccatgcatggtctgtggagagtcagcagaactgtcgccaggcccagcccgccacacgccctgggaggccgggcccagcacccaaccagcgccggcctcgggaccacaagggtgaccagcagacccaggaacaaactgctccagcagacaatt

SEQ ID NO: 1908 - DNA, 289 bp, Mus musculus; identical to SEQ ID NO: 1907

SEQ ID NO: 1909 - DNA, 412 bp, Mus musculus
tttgggaggctcgaaggcagtcattgagcttgctttcatcttggtctctcgcagaagtagagtgagttccgcattcaaaggttcttctcgccccctggtggccacagtgcaggatgatgcctgcttttctgagcctcaatttagggcagttttggaagtagttgttggagactagacagtggtcttcattgttccctccctgtcctctttcttgctcagataaaatcttgatctgtatcccagactggccttgaactcaagatcctcccaagccagacttggtggctcacacctaaagtctcaaaattggggagggtgacacaagttgatcaccacaagtttgaagctaaccttgtttcaaaaaagtgaaggaagaccttaggatgtaacttagtaggttgcctattggagc

SEQ ID NO: 1910 - DNA, 412 bp, Mus musculus; identical to SEQ ID NO: 1909

SEQ ID NO: 1911 - DNA, 428 bp, Mus musculus
  misc_feature (161)..(161): n is a, c, g, or t
  misc_feature (354)..(356): n is a, c, g, or t
  misc_feature (359)..(359): n is a, c, g, or t
  misc_feature (376)..(390): n is a, c, g, or t
aggtatagctgtctcatgcccctgcctgcctattctggccagtaccctaagccccaagatctccagcccctgccccagtatccttgccttctgatgccttaaagttgggccacaggtcctgctgggtcagagcctcacagatgcggactccaaaagctccnctcaggaccaaagagctctggcctagggttcatcctttctccaggtgtctgccctgtggacagaaggctaaagccttgatcttggcaaaccaccccttttgcccaaagcctggatgcagagaccagtattttctgctggcttcaacagtctcccctgctgtctgtgaaaggtgaccattgtacccaggccacnnngcntctaccatgttctttcnnnnnnnnnnnnnnnccatccccaggctggatcactggagcaggcctcctctc

SEQ ID NO: 1912 - DNA, 428 bp, Mus musculus; identical to SEQ ID NO: 1911
  misc_feature (161)..(161): n is a, c, g, or t
  misc_feature (354)..(356): n is a, c, g, or t
  misc_feature (359)..(359): n is a, c, g, or t
  misc_feature (376)..(390): n is a, c, g, or t

SEQ ID NO: 1913 - DNA, 564 bp, Mus musculus
  misc_feature (218)..(218): n is a, c, g, or t
  misc_feature (220)..(220): n is a, c, g, or t
  misc_feature (223)..(223): n is a, c, g, or t
  misc_feature (263)..(263): n is a, c, g, or t
  misc_feature (265)..(265): n is a, c, g, or t
  misc_feature (336)..(336): n is a, c, g, or t
  misc_feature (464)..(464): n is a, c, g, or t
  misc_feature (513)..(513): n is a, c, g, or t
  misc_feature (517)..(521): n is a, c, g, or t
  misc_feature (528)..(537): n is a, c, g, or t
  misc_feature (539)..(539): n is a, c, g, or t
tacttgaaatgtatgtctcgggccgaggcaaactccattcctcatattaaatcccggctgttacttctcactacgtcaccatttttaactgacaggattagtaaagtattaagacagcaaactcgtgtctgtctgttccttcccctgctccagtttgcttctggcatctgtgactgtgcttgtcaacaggagactttttcagaatcgtactggggaancngcnattttacagcctcaagtttttaaacatgatttatatgttntntacagttgttcagtttgtaactttttaaagtttggatgtatagaaggataaataggaaatataaaaattgnttatttggggggcttttttacttattgtatttaaaaataaaagggtatcaatgtgaaattatgtacattttaaatgcttatgaatcaagtcattgttgaacaaaagatttgttgctgtgtaattattntcttgtatgcatttgagagaaataaatatactcagacttatgttttaanaaannnnnaaaaaannnnnnnnnnangcaacgcacatgttgggtttatata

SEQ ID NO: 1914 - DNA, 564 bp, Mus musculus; identical to SEQ ID NO: 1913
  misc_feature (218)..(218): n is a, c, g, or t
  misc_feature (220)..(220): n is a, c, g, or t
  misc_feature (223)..(223): n is a, c, g, or t
  misc_feature (263)..(263): n is a, c, g, or t
  misc_feature (265)..(265): n is a, c, g, or t
  misc_feature (336)..(336): n is a, c, g, or t
  misc_feature (464)..(464): n is a, c, g, or t
  misc_feature (513)..(513): n is a, c, g, or t
  misc_feature (517)..(521): n is a, c, g, or t
  misc_feature (528)..(537): n is a, c, g, or t
  misc_feature (539)..(539): n is a, c, g, or t

SEQ ID NO: 1915 - DNA, 377 bp, Mus musculus
  misc_feature (203)..(203): n is a, c, g, or t
  misc_feature (223)..(223): n is a, c, g, or t
  misc_feature (268)..(268): n is a, c, g, or t
  misc_feature (299)..(299): n is a, c, g, or t
  misc_feature (320)..(320): n is a, c, g, or t
  misc_feature (331)..(331): n is a, c, g, or t
agatgtcttcagcacctgatcctccaacagttaaaaaagaaccattaaaagagaaaaactttgaaaacccaggcctccgaggggcgcacacaaccaccttatttcgagctgtgaatcccgagctcttcattaaacccaacaaacctgtgatggcttttggattggtaaccctttcactttgtgtggcttacattggttatctncatgcaactcaagagaacanaaaggacctctatgaagccattgacagtgaagggcatcggtacangaggagaaaaacatctaagtgggactaactnctgcttccttcaggtggagtnttattataggntccgacacctttgaaagaaagactgttagtgcacagaattgtttct

SEQ ID NO: 1916 - DNA, 377 bp, Mus musculus; identical to SEQ ID NO: 1915
  misc_feature (203)..(203): n is a, c, g, or t
  misc_feature (223)..(223): n is a, c, g, or t
  misc_feature (268)..(268): n is a, c, g, or t
  misc_feature (299)..(299): n is a, c, g, or t
  misc_feature (320)..(320): n is a, c, g, or t
  misc_feature (331)..(331): n is a, c, g, or t

SEQ ID NO: 1917 - DNA, 113 bp, Mus musculus
acctgaacctttaaagatgtgtattgtaagattagaaaggacgtatggctgccctcacctccgtgtaaaagcacagcaggctgcatcgcacttctctcctagagcagatctgt

SEQ ID NO: 1918 - DNA, 113 bp, Mus musculus; identical to SEQ ID NO: 1917

SEQ ID NO: 1919 - DNA, 374 bp, Mus musculus
tctgagggtgactgtctggttctaggaaatgttttgtaatacaaatgcttaccctattgggggcggggcgtcggggagtcttccagaggaagggcacactcactcacacacagccagctattgccggcagaggatcatggggttcagtcttcgtgtgggtcaggtctccaagctgattcttttctttccagacagaaccatagggagagtttactttttgccaaatgtcagaacaggtacacatttttaaatgtaatgctttttaaatagtaaactgtataaaatgagaagtacccacatataaaaatacttgaggtcaaggttctcttgagtgactatcatctgcatatctctgtaagttcaagtgtgtcgtt

SEQ ID NO: 1920 - DNA, 374 bp, Mus musculus; identical to SEQ ID NO: 1919

SEQ ID NO: 1921 - DNA, 470 bp, Mus musculus
  misc_feature (182)..(196): n is a, c, g, or t
  misc_feature (207)..(207): n is a, c, g, or t
  misc_feature (274)..(274): n is a, c, g, or t
  misc_feature (304)..(326): n is a, c, g, or t
  misc_feature (369)..(373): n is a, c, g, or t
  misc_feature (376)..(389): n is a, c, g, or t
catcttaagtcttggcagggccctcccccaccgccctccctttcctttcccacgctctctgtaaagccacgtgtttgagcggttcgctgtttgtttccctgagaccctccccgtaaacggtaactgagtcagttgttctgtatactctgagactagatataccagataccgccgagtttgannnnnnnnnnnnnnnttgccactgtntgagcctctgggccaaatactgtcgcagtattaccgagcattaagtgcttcagtgttacgaattttntccaaactacctaagtaattttctagaaannnnnnnnnnnnnnnnnnnnnnnaggtccagattgcttagatgattaaataacatgcagaagtaannnnnaannnnnnnnnnnnnnaatgcccggacgctttgtgcttattccttgaagctagaaggttccaggcttcccaacccaatgactttagttaaagaagct

SEQ ID NO: 1922 - DNA, 470 bp, Mus musculus; identical to SEQ ID NO: 1921
  misc_feature (182)..(196): n is a, c, g, or t
  misc_feature (207)..(207): n is a, c, g, or t
  misc_feature (274)..(274): n is a, c, g, or t
  misc_feature (304)..(326): n is a, c, g, or t
  misc_feature (369)..(373): n is a, c, g, or t
  misc_feature (376)..(389): n is a, c, g, or t

SEQ ID NO: 1923 - DNA, 312 bp, Mus musculus
tctcagtggctgtggggcaccatcagccttccctttctttaccacatgcagaaaggctgccttgcccagcttcagacgctgccgtgcggacagcgcctccatctttttcttctgggcttcaatagctctgcgcttttcctccagctgcatgtgcagctgcaccagctcagaagccagcaggctggcagggtccttgctgtgcctgcctggactctgctccctcttctggcgccacgttgtcagaggggctgggcagctttcagatgcatcaggggtggtcttctgggagctgctggtgctggacttggtctc

SEQ ID NO: 1924 - DNA, 312 bp, Mus musculus; identical to SEQ ID NO: 1923

SEQ ID NO: 1925 - DNA, 326 bp, Mus musculus
  misc_feature (26)..(26): n is a, c, g, or t
actttgatggccacctgatgtctatncgtgacgctgtgtcccgtgaaggaatgtttgactttttaaacttttgtatgagttcattaagcaacctcattaagttgagcaattttttagtctctctgagcgttatgcttgtctagagcagtattttcagctcaaaatgtcccagagaggtatatggattcatttctgggtcacagcagggtcttctgggggtgcatgctttccactgtgtaccacactgttcgcttccgcgctgggcgccaaataagtctccaggcccgcccggcccgtgcgtgcgcggcctcggtgttgcgtcacta

SEQ ID NO: 1926 - DNA, 326 bp, Mus musculus; identical to SEQ ID NO: 1925
  misc_feature (26)..(26): n is a, c, g, or t

SEQ ID NO: 1927 - DNA, 515 bp, Mus musculus
  misc_feature (54)..(94): n is a, c, g, or t
  misc_feature (391)..(391): n is a, c, g, or t
  misc_feature (453)..(462): n is a, c, g, or t
accgttgttatgatgctgactttttttttccttttttaattgtactgtctctcnnnnnnnnnnnnnnnnnnnnnnnnnnnnnnnnnnnnnnnnnaaaaaaaatctggcttttgccgtgtattgagtggctacgtcttcagtctttcccctcctaaggaaattacccttacatatttatgtgggatttccaaagacctttgggataatccgtgagatagtgcatgggctttttgtcatgtacataggctcagcttttgtcctgtgctgtttgttcttcactgtgcgctcccactggcgatgatctgtgcagtacagttggtctcatggcgactacccgtatgcttaagcctgaaaattatttcacagttcactcagccgacaactcccaaantgagttgcatactgcttatcgacacgagagagataaggggcacacttccctcgttttaaggnnnnnnnnnntttactctagcctaacacctcccagtcaatgaatacttaccatcataagtagg

SEQ ID NO: 1928 - DNA, 515 bp, Mus musculus; identical to SEQ ID NO: 1927
  misc_feature (54)..(94): n is a, c, g, or t
  misc_feature (391)..(391): n is a, c, g, or t
  misc_feature (453)..(462): n is a, c, g, or t

SEQ ID NO: 1929 - DNA, 537 bp, Mus musculus
  misc_feature (44)..(44): n is a, c, g, or t
  misc_feature (66)..(66): n is a, c, g, or t
  misc_feature (81)..(81): n is a, c, g, or t
  misc_feature (88)..(88): n is a, c, g, or t
  misc_feature (94)..(96): n is a, c, g, or t
  misc_feature (98)..(100): n is a, c, g, or t
  misc_feature (103)..(103): n is a, c, g, or t
  misc_feature (119)..(151): n is a, c, g, or t
  misc_feature (325)..(361): n is a, c, g, or t
  misc_feature (365)..(365): n is a, c, g, or t
  misc_feature (369)..(418): n is a, c, g, or t
  misc_feature (425)..(425): n is a, c, g, or t
  misc_feature (433)..(433): n is a, c, g, or t
  misc_feature (458)..(458): n is a, c, g, or t
  misc_feature (472)..(472): n is a, c, g, or t
tgcctgctgactgaaaagaacataggaatacactggagtgcaancactgccgtgccaagctgctcnaaacctcactgatcngaggccnactgcnnncnnnggnggcccactgcctaccnnnnnnnnnnnnnnnnnnnnnnnnnnnnnnnnngtgtggagactgaagatctgcacatgtgaggaagcagggagctacagtggccctcagcccagtctgcgggtcttccctctacctcacactgaactcagaagggaaggaaggagagacgcacatgggattctcccacctcagaagtattgtgacagcaccgcataaccacggttnnnnnnnnnnnnnnnnnnnnnnnnnnnnnnnnnnnnnggtntgcnnnnnnnnnnnnnnnnnnnnnnnnnnnnnnnnnnnnnnnnnnnnnnnnnntctcatntgctgtantcggaggcgagcgcagtggcctgantcatgggaaatgantcagcaggcggcaactacttttgaaaaggatcatgatttccgagctactttataatcaagacaag

SEQ ID NO: 1930 - DNA, 537 bp, Mus musculus; identical to SEQ ID NO: 1929
  misc_feature (44)..(44): n is a, c, g, or t
  misc_feature (66)..(66): n is a, c, g, or t
  misc_feature (81)..(81): n is a, c, g, or t
  misc_feature (88)..(88): n is a, c, g, or t
  misc_feature (94)..(96): n is a, c, g, or t
  misc_feature (98)..(100): n is a, c, g, or t
  misc_feature (103)..(103): n is a, c, g, or t
  misc_feature (119)..(151): n is a, c, g, or t
  misc_feature (325)..(361): n is a, c, g, or t
  misc_feature (365)..(365): n is a, c, g, or t
  misc_feature (369)..(418): n is a, c, g, or t
  misc_feature (425)..(425): n is a, c, g, or t
  misc_feature (433)..(433): n is a, c, g, or t
  misc_feature (458)..(458): n is a, c, g, or t
  misc_feature (472)..(472): n is a, c, g, or t

SEQ ID NO: 1931 - DNA, 500 bp, Mus musculus
  misc_feature (83)..(83): n is a, c, g, or t
  misc_feature (86)..(87): n is a, c, g, or t
  misc_feature (154)..(156): n is a, c, g, or t
  misc_feature (158)..(158): n is a, c, g, or t
  misc_feature (161)..(161): n is a, c, g, or t
  misc_feature (165)..(165): n is a, c, g, or t
  misc_feature (181)..(216): n is a, c, g, or t
  misc_feature (313)..(327): n is a, c, g, or t
  misc_feature (354)..(371): n is a, c, g, or t
  misc_feature (439)..(454): n is a, c, g, or t
caaggagcacttccatgtcttctgggatggactcctctggaaacttagccagagcacctctgagctaaaagacagtgaattgnggnnaataaattctttgtgcggattctgaatgccagtgacaagtccacagtgtctgttctgggggagctgnnngncanaaangggtggggcttttgannnnnnnnnnnnnnnnnnnnnnnnnnnnnnnnnnnntggaagctggggaagacaatcagcccggaagctttgctcactcagcaagacaagcagccaggcggctcccagagccctgcctaagccatgggtatgnnnnnnnnnnnnnnnggggctgctgtgatttgtttagagcannnnnnnnnnnnnnnnnngtccttcactaggggtcactctcagtagcacagctttcagccaggtggctgtgccctggcagcctcannnnnnnnnnnnnnnnggtttctgtgcagacagctgctttttagccctctggcttctgcctt

SEQ ID NO: 1932 - DNA, 500 bp, Mus musculus; identical to SEQ ID NO: 1931
  misc_feature (83)..(83): n is a, c, g, or t
  misc_feature (86)..(87): n is a, c, g, or t
  misc_feature (154)..(156): n is a, c, g, or t
  misc_feature (158)..(158): n is a, c, g, or t
  misc_feature (161)..(161): n is a, c, g, or t
  misc_feature (165)..(165): n is a, c, g, or t
  misc_feature (181)..(216): n is a, c, g, or t
  misc_feature (313)..(327): n is a, c, g, or t
  misc_feature (354)..(371): n is a, c, g, or t
  misc_feature (439)..(454): n is a, c, g, or t

SEQ ID NO: 1933 - DNA, 509 bp, Mus musculus
  misc_feature (220)..(220): n is a, c, g, or t
  misc_feature (308)..(308): n is a, c, g, or t
  misc_feature (310)..(310): n is a, c, g, or t
  misc_feature (312)..(312): n is a, c, g, or t
  misc_feature (330)..(330): n is a, c, g, or t
  misc_feature (341)..(341): n is a, c, g, or t
  misc_feature (350)..(350): n is a, c, g, or t
  misc_feature (360)..(360): n is a, c, g, or t
  misc_feature (375)..(375): n is a, c, g, or t
  misc_feature (462)..(462): n is a, c, g, or t
  misc_feature (464)..(464): n is a, c, g, or t
  misc_feature (483)..(483): n is a, c, g, or t
aacaggggtccactggtgccctggagaccggaagcctcaaggatcacaaaggtggggagcaatggacaagtcacccccatgactgctttgtgagggggcagggctgagacagaatctggcctggaatgcattgtatagcccaggctagcttcacatttccagtaattcttttgccttggtttcccaagtgctaaattctaggaatgggcctccacacgcnagctgttgattgcttttttgaactgtattgtaacctcagacctactagacaacttggagatgtggtaggcttagctaacttgctttcnanantcaagcaaacgccagtanatggggaaatntggtgcctnggttcctagnttggatgtgacaggntggagtgacagcaagaggattcaccatatttcccttccttcctgagggtttgttttcgttcactgtttttggtgtttgaagacaatntnttatgtagtccaggctggntcaaacttgctttacatccagagttg

SEQ ID NO: 1934 - DNA, 509 bp, Mus musculus; identical to SEQ ID NO: 1933
  misc_feature (220)..(220): n is a, c, g, or t
  misc_feature (308)..(308): n is a, c, g, or t
  misc_feature (310)..(310): n is a, c, g, or t
  misc_feature (312)..(312): n is a, c, g, or t
  misc_feature (330)..(330): n is a, c, g, or t
  misc_feature (341)..(341): n is a, c, g, or t
  misc_feature (350)..(350): n is a, c, g, or t
  misc_feature (360)..(360): n is a, c, g, or t
  misc_feature (375)..(375): n is a, c, g, or t
  misc_feature (462)..(462): n is a, c, g, or t
  misc_feature (464)..(464): n is a, c, g, or t
  misc_feature (483)..(483): n is a, c, g, or t

SEQ ID NO: 1935 - DNA, 395 bp, Mus musculus
  misc_feature (54)..(56): n is a, c, g, or t
  misc_feature (58)..(58): n is a, c, g, or t
  misc_feature (65)..(66): n is a, c, g, or t
  misc_feature (70)..(70): n is a, c, g, or t
  misc_feature (72)..(72): n is a, c, g, or t
  misc_feature (74)..(75): n is a, c, g, or t
  misc_feature (81)..(81): n is a, c, g, or t
  misc_feature (85)..(85): n is a, c, g, or t
  misc_feature (88)..(88): n is a, c, g, or t
  misc_feature (94)..(142): n is a, c, g, or t
  misc_feature (156)..(156): n is a, c, g, or t
  misc_feature (158)..(158): n is a, c, g, or t
gcgtgggttgttttcccatatacctatctatgccggtgattttacattcttgtnnntnttttttnntttnanannaaaaanaaanacnaacccnnnnnnnnnnnnnnnnnnnnnnnnnnnnnnnnnnnnnnnnnnnnnnnnntgaagtccgcaggncntgcctattgttgttggagcttaaaccccttgtatatttgccccttttgagaactgccccacgttgatagcacagaggagcccggcatgcactgtatgggaaagcactccaccttgttacagttttaaatttcttgctatcttagcactcagataccaatggcttgctaaaaagaaaaagaagaaatgtaatgtctttttattctcaggtcaatcggtcacccttcgttctgttttca

SEQ ID NO: 1936 - DNA, 395 bp, Mus musculus; identical to SEQ ID NO: 1935
  misc_feature (54)..(56): n is a, c, g, or t
  misc_feature (58)..(58): n is a, c, g, or t
  misc_feature (65)..(66): n is a, c, g, or t
  misc_feature (70)..(70): n is a, c, g, or t
  misc_feature (72)..(72): n is a, c, g, or t
  misc_feature (74)..(75): n is a, c, g, or t
  misc_feature (81)..(81): n is a, c, g, or t
  misc_feature (85)..(85): n is a, c, g, or t
  misc_feature (88)..(88): n is a, c, g, or t
  misc_feature (94)..(142): n is a, c, g, or t
  misc_feature (156)..(156): n is a, c, g, or t
  misc_feature (158)..(158): n is a, c, g, or t

SEQ ID NO: 1937 - DNA, 359 bp, Mus musculus
  misc_feature (79)..(142): n is a, c, g, or t
  misc_feature (145)..(145): n is a, c, g, or t
  misc_feature (203)..(203): n is a, c, g, or t
cttttggtctgagatgctgggcgttggggacttctattatgaactgggtgtccagattattgaagtgtgcctggccctnnnnnnnnnnnnnnnnnnnnnnnnnnnnnnnnnnnnnnnnnnnnnnnnnnnnnnnnnnnnnnnnggnaagtttgctcaggatgtcagccaagacgacctgatcagggccatcaagaagctgaaanccctgggcactggattcggcatcatccctgtgggaggcacttacctcatccagtctgttcccgctgagctcaatatggatcacactgttgtgctgcagctggccgagaaaaacgggtatgtgactgtcagtgaaatcaaaaccagtcttaaatggg

SEQ ID NO: 1938 - DNA, 359 bp, Mus musculus; identical to SEQ ID NO: 1937
  misc_feature (79)..(142): n is a, c, g, or t
  misc_feature (145)..(145): n is a, c, g, or t
  misc_feature (203)..(203): n is a, c, g, or t

SEQ ID NO: 1939 - DNA, 365 bp, Mus musculus
  misc_feature (317)..(333): n is a, c, g, or t
aatcaatgggcatgcgtgtgcacatttgggctggggagaaaagaaaatgtgaatcttactggtccagttcctagcgaggtctgggaactagctgctgtatatgtccttgatgctcagcccactctggcctaaatgctttttgttattaatattttttaatgaactgttatttttatacccagagccagtaaagaacagggtccctgccattagaatggaggtctgtcaggcactctgttgtccttccaactcagcttgtcctttgtcaagccaaggtctagctacggaggggcaggcgcaggtctcgggtgaggggnnnnnnnnnnnnnnnnncagccccttcccctgctgtgtgcatttgcgga

SEQ ID NO: 1940 - DNA, 365 bp, Mus musculus; identical to SEQ ID NO: 1939
  misc_feature (317)..(333): n is a, c, g, or t

SEQ ID NO: 1941 - DNA, 360 bp, Mus musculus
  misc_feature (26)..(26): n is a, c, g, or t
ctactgtgctcctggctctcagaatnccttgggaatggaaccaatgataccgtggagtgtgtgagcaaagctggaacagagcttgtaagtatcccaaagcacgtgttgttgcaagtgccacaccagaacttctgcacactccgtcctgggccagcctgtcctgtgtgggccctcacatactctccacctcaggaggggacttctctcataaagcctcgtttatgtcactttcttggcagccttattgtcatggactggaacattctactctcatctgtaaagccttcccatctcattattccttgcactaaccacagccactaggaaattaatattttgctactgatcactgaataaacg

SEQ ID NO: 1942 - DNA, 360 bp, Mus musculus; identical to SEQ ID NO: 1941
  misc_feature (26)..(26): n is a, c, g, or t

SEQ ID NO: 1943 - DNA, 227 bp, Mus musculus
cctgtcgttgcctggaagcgctgtctggtaatagcctgtctcctcctgtgggggggtcttggcattctttgcagtgaggaaggctactgctaattccaagtttccgttactatccttcagggcttgttggagtatctgggcgtcattaatcccagtaatttctctcagctgattcaaaaatgtctgctggtgcttctgcgccgcgctctgctgcagcacattctgct

SEQ ID NO: 1944 - DNA, 227 bp, Mus musculus; identical to SEQ ID NO: 1943

SEQ ID NO: 1945 - DNA, 370 bp, Mus musculus
  misc_feature (68)..(68): n is a, c, g, or t
  misc_feature (268)..(268): n is a, c, g, or t
ctagacagcactagtgggccaccaccggtcagacgcactggtgtctgtgtacttcgggaatgtttatntgtgattttgcacatgcactctcgtgcacgttgtgcacatgagcacgtgggcaggcccactcacgcgcatgtccaatagggttattctgtagcttttccttcatgtcagtagcccagcggcctccaagtccttcccagtcacctttactccaaggaggaaagagaaaattcatccacgcctacagcgcaagagacgaaantctcttatggctattgttgaatacgaactaaaggagaatgagaatgtgacagacagacaaacggaacccagcagggggagctcgaggagcagactgtgttaa

SEQ ID NO: 1946 - DNA, 370 bp, Mus musculus; identical to SEQ ID NO: 1945
  misc_feature (68)..(68): n is a, c, g, or t
  misc_feature (268)..(268): n is a, c, g, or t

SEQ ID NO: 1947 - DNA, 472 bp, Mus musculus
  misc_feature (159)..(159): n is a, c, g, or t
  misc_feature (167)..(167): n is a, c, g, or t
  misc_feature (331)..(333): n is a, c, g, or t
  misc_feature (335)..(336): n is a, c, g, or t
  misc_feature (338)..(339): n is a, c, g, or t
  misc_feature (342)..(345): n is a, c, g, or t
  misc_feature (348)..(350): n is a, c, g, or t
  misc_feature (353)..(353): n is a, c, g, or t
  misc_feature (356)..(358): n is a, c, g, or t
  misc_feature (364)..(364): n is a, c, g, or t
  misc_feature (368)..(368): n is a, c, g, or t
  misc_feature (379)..(379): n is a, c, g, or t
  misc_feature (388)..(388): n is a, c, g, or t
  misc_feature (394)..(394): n is a, c, g, or t
  misc_feature (398)..(398): n is a, c, g, or t
  misc_feature (406)..(407): n is a, c, g, or t
  misc_feature (434)..(434): n is a, c, g, or t
caacctctggagtcggggctctcctctgtgtgggttccagagatcatcaggcttggcagaggcgcctctacccactgagccatctcgccacccagtctaccttgctttttagatggagtctcgtattgagtctggctgtgtttgcaggtcagcaagccncagggatnctcccgtctctgcctgcccagtgctgggattgcaggctcacctttatcctggccgttccgtgaacgatgcagggctgtagtggatgttcatgcttgtgcacaggcacgctaccgaccctcctgcctttcagctgatgccatagcttcccgggtgcctggccagnnngnngnnggnnnntcnnnctnttnnnggcccnggcnaagggccagantgggtggantgggtntatnagctgganntaaagactatactgggtgtgcatggtntcgcacattctctaaactgtcacgctcgcctcagagat

SEQ ID NO: 1948 - DNA, 472 bp, Mus musculus; identical to SEQ ID NO: 1947
  misc_feature (159)..(159): n is a, c, g, or t
  misc_feature (167)..(167): n is a, c, g, or t
  misc_feature (331)..(333): n is a, c, g, or t
  misc_feature (335)..(336): n is a, c, g, or t
  misc_feature (338)..(339): n is a, c, g, or t
  misc_feature (342)..(345): n is a, c, g, or t
  misc_feature (348)..(350): n is a, c, g, or t
  misc_feature (353)..(353): n is a, c, g, or t
  misc_feature (356)..(358): n is a, c, g, or t
  misc_feature (364)..(364): n is a, c, g, or t
  misc_feature (368)..(368): n is a, c, g, or t
  misc_feature (379)..(379): n is a, c, g, or t
  misc_feature (388)..(388): n is a, c, g, or t
  misc_feature (394)..(394): n is a, c, g, or t
  misc_feature (398)..(398): n is a, c, g, or t
  misc_feature (406)..(407): n is a, c, g, or t
  misc_feature (434)..(434): n is a, c, g, or t

SEQ ID NO: 1949 - DNA, 497 bp, Mus musculus
  misc_feature (33)..(33): n is a, c, g, or t
  misc_feature (83)..(83): n is a, c, g, or t
  misc_feature (86)..(86): n is a, c, g, or t
  misc_feature (103)..(103): n is a, c, g, or t
  misc_feature (127)..(127): n is a, c, g, or t
  misc_feature (129)..(129): n is a, c, g, or t
  misc_feature (138)..(138): n is a, c, g, or t
  misc_feature (140)..(140): n is a, c, g, or t
  misc_feature (177)..(206): n is a, c, g, or t
  misc_feature (377)..(377): n is a, c, g, or t
ctgtggaccgcgtgggactcatcacacgcagtnagcgctacgtttgcgcagtgacccgagacagtctgagcaatgccacgccntgngcagtgctgcgtccctntggggctgtggtcaccctggagtntnttgagaaantnatccggaaggacatggtggaccccgtgaatggggacnnnnnnnnnnnnnnnnnnnnnnnnnnnnnncagcggggcggcaccggctttgcgggctccggagtgaagctacaggcagaaatgtctcggccagtgatgcaggcctgagccgtggcctaataaacgtggatgtgaacatctggatgcctggcgcctcattgtaggcccggcgacagaaggagtgggcctgcggtgtgggcntgggctcctgggatttactcagtcacttaggaccaggcagaaaccccggcgtgaacctgtgggtctcctccagcctcaggcaggacttggaagagggtgccctgaacaagaagttgccct

SEQ ID NO: 1950 - DNA, 497 bp, Mus musculus; identical to SEQ ID NO: 1949
  misc_feature (33)..(33): n is a, c, g, or t
  misc_feature (83)..(83): n is a, c, g, or t
  misc_feature (86)..(86): n is a, c, g, or t
  misc_feature (103)..(103): n is a, c, g, or t
  misc_feature (127)..(127): n is a, c, g, or t
  misc_feature (129)..(129): n is a, c, g, or t
  misc_feature (138)..(138): n is a, c, g, or t
  misc_feature (140)..(140): n is a, c, g, or t
  misc_feature (177)..(206): n is a, c, g, or t
  misc_feature (377)..(377): n is a, c, g, or t

SEQ ID NO: 1951 - DNA, 399 bp, Mus musculus
  misc_feature (319)..(335): n is a, c, g, or t
attgaggaccattacagaaaacaccccacccaaccccacctgaggaagtgatacaccccagctcagtgtgccagccacaccagtcactgggctgtatggaagtggtgcccagagcaagccctgctctcactgaagatggtggccgctgcttgggaccaccccagcggcctcaagaatcctgactccgttcgttctccagaaggcaggagcctctgaattttaaagtgggttttcattccagtaccttcaaatccgtggttcccctcaattctctgcccttgagaggacttgggattctgtcagctacctccccaggagnnnnnnnnnnnnnnnnnttggcccattccttgattagatgacagctgtgagtgagatatctgctgctaactcagctgcttc

SEQ ID NO: 1952 - DNA, 399 bp, Mus musculus; identical to SEQ ID NO: 1951
  misc_feature (319)..(335): n is a, c, g, or t

SEQ ID NO: 1953 - DNA, 558 bp, Mus musculus
  misc_feature (237)..(237): n is a, c, g, or t
  misc_feature (239)..(242): n is a, c, g, or t
  misc_feature (244)..(244): n is a, c, g, or t
  misc_feature (254)..(255): n is a, c, g, or t
  misc_feature (488)..(526): n is a, c, g, or t
aactcttaaaagagacagttacagagaaacaacttgtgagaattctccaaagtctcctaaagtgactcggacagattctaaaaggagacagaacacaacttctcagtgcagggcacaaaatctccaggatcctgtgccaaaagattccccaaaatcatggttttttgataaccggtcaaagtctcttccagcacctcacccgatccgctattttgacaactccagtctagggctgtncnnnnanccagatgacnnagagaatgtggagcctaagacagacctctgccaagcctccttggaaaaagatgtgtcccagtgcaagacgcagtagatgcccctgtcccgtcagagcagagcgcccttggatggatgcccccgtcagccgagcgctcttggatgcctttcctcgtgtgtccacactgacaaagatgatgcaatccaacttagtttcagtctaatttccactttagaagatggaggaacaagannnnnnnnnnnnnnnnnnnnnnnnnnnnnnnnnnnnnnntctttctgcttgcatctgtgacattccacacg

SEQ ID NO: 1954 - DNA, 558 bp, Mus musculus; identical to SEQ ID NO: 1953
  misc_feature (237)..(237): n is a, c, g, or t
  misc_feature (239)..(242): n is a, c, g, or t
  misc_feature (244)..(244): n is a, c, g, or t
  misc_feature (254)..(255): n is a, c, g, or t
  misc_feature (488)..(526): n is a, c, g, or t

SEQ ID NO: 1955 - DNA, 529 bp, Mus musculus
  misc_feature (149)..(168): n is a, c, g, or t
  misc_feature (212)..(212): n is a, c, g, or t
  misc_feature (291)..(291): n is a, c, g, or t
  misc_feature (363)..(364): n is a, c, g, or t
  misc_feature (366)..(366): n is a, c, g, or t
  misc_feature (369)..(376): n is a, c, g, or t
  misc_feature (385)..(385): n is a, c, g, or t
  misc_feature (391)..(391): n is a, c, g, or t
  misc_feature (418)..(418): n is a, c, g, or t
  misc_feature (432)..(432): n is a, c, g, or t
  misc_feature (485)..(486): n is a, c, g, or t
tcctaatttagtgacttctggcaaaattttaccttaaatcttaaatcaatgtgattccttgttttgggagacggtggaggtaacctcattcgtttgttctttcttcaggcttgtgtctttagtttcgtggctgcgcaggcctgcctatnnnnnnnnnnnnnnnnnnnntaaacgtttctcttcctgtgagacttactaaagcaacttagtgncaaaagtaatgttgtacttacacctctgtacagaaatgacagtgagctggatatatggtttacagtagacatccacttncaaagcatctggacagaatgttaaaggcaatgtgcaaaatttaaaataaagagtatttattaatacgcatannanaannnnnnnnacatgtttntactcnccgtggtggtactttagtatttgccantcgtgaactttgtntctaaccattgttgatggagagagcatgaagagcaaatgagggtagagattcnnactgcccaagactgaattcttcctttgatgagacttgataact

SEQ ID NO: 1956 - DNA, 529 bp, Mus musculus; identical to SEQ ID NO: 1955
  misc_feature (149)..(168): n is a, c, g, or t
  misc_feature (212)..(212): n is a, c, g, or t
  misc_feature (291)..(291): n is a, c, g, or t
  misc_feature (363)..(364): n is a, c, g, or t
  misc_feature (366)..(366): n is a, c, g, or t
  misc_feature (369)..(376): n is a, c, g, or t
  misc_feature (385)..(385): n is a, c, g, or t
  misc_feature (391)..(391): n is a, c, g, or t
  misc_feature (418)..(418): n is a, c, g, or t
  misc_feature (432)..(432): n is a, c, g, or t
  misc_feature (485)..(486): n is a, c, g, or t

SEQ ID NO: 1957 - DNA, 464 bp, Mus musculus
  misc_feature (28)..(28): n is a, c, g, or t
  misc_feature (39)..(39): n is a, c, g, or t
  misc_feature (130)..(145): n is a, c, g, or t
  misc_feature (371)..(404): n is a, c, g, or t
cccatcttcctctggggagtactaatantcacacgtgtntggctggctgtaaaagagagaaccccgctacttgggagttctcagcctcggtccatttattcctgtggacttattccacttattctggctnnnnnnnnnnnnnnnnttccctccccttatctcctcagagtattcccatggtctctgcccagtcagagttgagaatggtgccaaagtccatcaatgctccccaggctcctttacccttcaccccaccccaacccgcatcttggacccctgggggctgaccccttctcagtgctcctagagcctcaagtagaatggtgcccacagcattccctgggtgcttcctgggtggggcctccagctcnnnnnnnnnnnnnnnnnnnnnnnnnnnnnnnnnntaaaaaagcctgggggctggagcagggtacccctgaggaggccctcttgtgtgctcctca

SEQ ID NO: 1958 - DNA, 464 bp, Mus musculus; identical to SEQ ID NO: 1957
  misc_feature (28)..(28): n is a, c, g, or t
  misc_feature (39)..(39): n is a, c, g, or t
  misc_feature (130)..(145): n is a, c, g, or t
  misc_feature (371)..(404): n is a, c, g, or t

SEQ ID NO: 1959 - DNA, 511 bp, Mus musculus
  misc_feature (328)..(352): n is a, c, g, or t
  misc_feature (412)..(413): n is a, c, g, or t
  misc_feature (421)..(421): n is a, c, g, or t
ctgggcttcgcacctttgagatattcgtgcacctgctggccctgttggtgttctccgtactgttggcactgcgagtggatggcttgactccgggcctctcctggtggaacgtctttgtgccctttttcgccgccgacgggctcagtacctacttcaccaccatcgtttccgttcgactcttccaagatggggagaagcgactggctgtgctgcgcctcttctgggttctcaccgtccttagcctcaagtttgtctttgagatgttgctgtgccagaagctagtggagcagactcgagagctctggttcggcctgatcacgtctccggnnnnnnnnnnnnnnnnnnnnnnnnngatccgggcttgtcgcgtcaactagcctcttgcagtggctggaaatggagcactgcgcanntggagttntggacctcccggtcctgacccaacttggtgccacactggtggagctttggtcagaaatcagtgtttgcttgtgcccagtttactgtccag

SEQ ID NO: 1960 - DNA, 511 bp, Mus musculus; identical to SEQ ID NO: 1959
  misc_feature (328)..(352): n is a, c, g, or t
  misc_feature (412)..(413): n is a, c, g, or t
  misc_feature (421)..(421): n is a, c, g, or t

SEQ ID NO: 1961 - DNA, 585 bp, Mus musculus
  misc_feature (60)..(114): n is a, c, g, or t
  misc_feature (120)..(146): n is a, c, g, or t
  misc_feature (162)..(162): n is a, c, g, or t
  misc_feature (198)..(198): n is a, c, g, or t
  misc_feature (401)..(417): n is a, c, g, or t
  misc_feature (439)..(439): n is a, c, g, or t
  misc_feature (496)..(510): n is a, c, g, or t
  misc_feature (515)..(539): n is a, c, g, or t
cagcaccgcacagtgtgtgaggagtgcgctcgaaggatgaagaagtgtatcaggtgccannnnnnnnnnnnnnnnnnnnnnnnnnnnnnnnnnnnnnnnnnnnnnnnnnnnnnncaggtnnnnnnnnnnnnnnnnnnnnnnnnnnnggagctacagagccgntacaggcagatggaggagcgcatcacctgccccatntgcatcgacagccacatccgcctggtgttccagtgcggccatggagcgtgcgcgccctgtggcgccgcgcttaacgcctgccccatctgccgccagcccatccgcgaccgcattcagatcttcgtgtgagcgcactccacacgccgtggctgatcgcagaccttccttcaaaacccctgtattttataaaaagattatcggannnnnnnnnnnnnnnnntgcctaagggtgttgggcaggncccagagatcctcaccgcccctcccccgctgcccaggccccaccccacgccccgccnnnnnnnnnnnnnnngactnnnnnnnnnnnnnnnnnnnnnnnnntgaggatgcagcccgccaaaagtgcgcgctggctttggtttgacac

SEQ ID NO: 1962 - DNA, 585 bp, Mus musculus; identical to SEQ ID NO: 1961
  misc_feature (60)..(114): n is a, c, g, or t
  misc_feature (120)..(146): n is a, c, g, or t
  misc_feature (162)..(162): n is a, c, g, or t
  misc_feature (198)..(198): n is a, c, g, or t
  misc_feature (401)..(417): n is a, c, g, or t
  misc_feature (439)..(439): n is a, c, g, or t
  misc_feature (496)..(510): n is a, c, g, or t
  misc_feature (515)..(539): n is a, c, g, or t

SEQ ID NO: 1963 - DNA, 356 bp, Mus musculus
  misc_feature (111)..(111): n is a, c, g, or t
  misc_feature (122)..(122): n is a, c, g, or t
  misc_feature (155)..(155): n is a, c, g, or t
tgtgctgtccctcagtttctccttttgtttaaagaaaagatgaacttgggtggttttgtttggtttggttttcttttttccttctgtttttaacaatagcctcatcgaggntgccttcagcncgcctccacacttggtgggtgcacgcagagcgnctttaagggacgtgaaatcagtattcaggaaacttggtgtcaagccttcccggccatcatgaaaagcacttctttcatggaggaaacagactctaatcctggagaaggaaatgaaggaaaaggaagttgtgttaagggatagattacttggtagctttgctgtttctgggtccttgtctggtcatagataccagatggagc

SEQ ID NO: 1964 - DNA, 356 bp, Mus musculus; identical to SEQ ID NO: 1963
  misc_feature (111)..(111): n is a, c, g, or t
  misc_feature (122)..(122): n is a, c, g, or t
  misc_feature (155)..(155): n is a, c, g, or t

SEQ ID NO: 1965 - DNA, 519 bp, Mus musculus
  misc_feature (178)..(192): n is a, c, g, or t
  misc_feature (293)..(308): n is a, c, g, or t
  misc_feature (430)..(430): n is a, c, g, or t
  misc_feature (433)..(433): n is a, c, g, or t
  misc_feature (437)..(458): n is a, c, g, or t
ggcggccgccattgtgcttcgtcgccgacttctctgccggtagcccgagagccgagccgagcccagcgaggaaggcggcggcggtgtggctgcggcgagcgcgacactccctgcagcggagtgctcggtggaagagggaaaccttaagaatggagtctaaaccttccaggattccaannnnnnnnnnnnnnnaaccctctggctctttaagcactaggatggtgtctggaaacagaggaaccagtttaaatgattcatatcattctagagactcctcctttagactggattcnnnnnnnnnnnnnnnntcagcatcagcgtgtgcatcaccatgtcagcctgcctggtacagtgagtctgagatacctcagggagcgcgggcacgagcacagacccagcagcgggatcatgactcaaagagacccaagcnttnctgnnnnnnnnnnnnnnnnnnnnnnatatgatgggaaatacaattgaaccaagcactcgtgtccgacttcagaggatgaattctga

SEQ ID NO: 1966 - DNA, 519 bp, Mus musculus; identical to SEQ ID NO: 1965
  misc_feature (178)..(192): n is a, c, g, or t
  misc_feature (293)..(308): n is a, c, g, or t
  misc_feature (430)..(430): n is a, c, g, or t
  misc_feature (433)..(433): n is a, c, g, or t
  misc_feature (437)..(458): n is a, c, g, or t

SEQ ID NO: 1967 - DNA, 379 bp, Mus musculus
  misc_feature (160)..(174): n is a, c, g, or t
  misc_feature (275)..(290): n is a, c, g, or t
tcgtcgccgacttctctgccggtagcccgagagccgagccgagcccagcgaggaaggcggcggcggtgtggctgcggcgagcgcgacactccctgcagcggagtgctcggtggaagagggaaaccttaagaatggagtctaaaccttccaggattccaannnnnnnnnnnnnnnaaccctctggctctttaagcactaggatggtgtctggaaacagaggaaccagtttaaatgattcatatcattctagagactcctcctttagactggattcnnnnnnnnnnnnnnnntcagcatcagcgtgtgcatcaccatgtcagcctgcctggtacagtgagtctgagatacctcagggagcgcgggcacgagcacagaccca

SEQ ID NO: 1968 - DNA, 379 bp, Mus musculus; identical to SEQ ID NO: 1967
  misc_feature (160)..(174): n is a, c, g, or t
  misc_feature (275)..(290): n is a, c, g, or t

SEQ ID NO: 1969 - DNA, 312 bp, Mus musculus
  misc_feature (48)..(48): n is a, c, g, or t
  misc_feature (52)..(52): n is a, c, g, or t
  misc_feature (162)..(162): n is a, c, g, or t
ctgtcaccgggtgtgctgtttttctgaaaaaaaaacaggccccaaggncctngagcctccagcccaaacccttagacctctgggatcacgttgagttctatttatttatttacttatttatttatttgtacccacccttccctcacttctgcccagctgggntccagagagaggaccctgcccatcctccttttgaagccaggacttattcttggttcatcatactccagaccatgtatcctctggtgtcctggctggaagaaggggcgtgtggccatgcagcccgctctcccaagctgtcccagcaaatgg

SEQ ID NO: 1970 - DNA, 312 bp, Mus musculus; identical to SEQ ID NO: 1969
  misc_feature (48)..(48): n is a, c, g, or t
  misc_feature (52)..(52): n is a, c, g, or t
  misc_feature (162)..(162): n is a, c, g, or t

SEQ ID NO: 1971 - DNA, 541 bp, Mus musculus
  misc_feature (274)..(274): n is a, c, g, or t
  misc_feature (294)..(296): n is a, c, g, or t
  misc_feature (298)..(300): n is a, c, g, or t
  misc_feature (313)..(313): n is a, c, g, or t
  misc_feature (324)..(324): n is a, c, g, or t
  misc_feature (341)..(341): n is a, c, g, or t
  misc_feature (343)..(343): n is a, c, g, or t
  misc_feature (346)..(346): n is a, c, g, or t
  misc_feature (352)..(352): n is a, c, g, or t
  misc_feature (364)..(364): n is a, c, g, or t
  misc_feature (366)..(366): n is a, c, g, or t
  misc_feature (368)..(368): n is a, c, g, or t
  misc_feature (393)..(393): n is a, c, g, or t
  misc_feature (443)..(443): n is a, c, g, or t
  misc_feature (445)..(445): n is a, c, g, or t
  misc_feature (465)..(480): n is a, c, g, or t
  misc_feature (507)..(507): n is a, c, g, or t
  misc_feature (509)..(509): n is a, c, g, or t
acgaggggtcagctagccaacacacagcctcctaagggcctgccagaccatccatcccgaggagtgcagtgaacctccctccctgcaggcatcacagcttcagcatgtccaaccacacgttccatttctcgggaggcagcatcaagtgtctccaaaggactcttactaggcctggaagggctgttcccttaccctggaaaagagcctatttcccctagagctgtgagtgggctgtctgtggctctgggatggaggtgtaccagttccagctgtngggagaatggattttggttnnntnnntttcagacctctntcctaaaggantcttttggacctaagtntnttntgttgntttaccattgantntnttccctgagagttgtttggatggcntcaaaggggttgtggtttgactgtgaagacagagggtggactatccagtntncaggtcaagttgtacatttnnnnnnnnnnnnnnnngtaatgcacatgtgtttgtatataatntntaaagggctatgggatgatcaggcctgcttag

SEQ ID NO: 1972 - DNA, 541 bp, Mus musculus; identical to SEQ ID NO: 1971
  misc_feature (274)..(274): n is a, c, g, or t
  misc_feature (294)..(296): n is a, c, g, or t
  misc_feature (298)..(300): n is a, c, g, or t
  misc_feature (313)..(313): n is a, c, g, or t
  misc_feature (324)..(324): n is a, c, g, or t
  misc_feature (341)..(341): n is a, c, g, or t
  misc_feature (343)..(343): n is a, c, g, or t
  misc_feature (346)..(346): n is a, c, g, or t
  misc_feature (352)..(352): n is a, c, g, or t
  misc_feature (364)..(364): n is a, c, g, or t
  misc_feature (366)..(366): n is a, c, g, or t
  misc_feature (368)..(368): n is a, c, g, or t
  misc_feature (393)..(393): n is a, c, g, or t
  misc_feature (443)..(443): n is a, c, g, or t
  misc_feature (445)..(445): n is a, c, g, or t
  misc_feature (465)..(480): n is a, c, g, or t
  misc_feature (507)..(507): n is a, c, g, or t
  misc_feature (509)..(509): n is a, c, g, or t

SEQ ID NO: 1973 - DNA, 535 bp, Mus musculus
  misc_feature (80)..(80): n is a, c, g, or t
  misc_feature (82)..(82): n is a, c, g, or t
  misc_feature (89)..(89): n is a, c, g, or t
  misc_feature (91)..(106): n is a, c, g, or t
  misc_feature (155)..(155): n is a, c, g, or t
  misc_feature (159)..(159): n is a, c, g, or t
  misc_feature (195)..(195): n is a, c, g, or t
  misc_feature (219)..(219): n is a, c, g, or t
  misc_feature (258)..(258): n is a, c, g, or t
  misc_feature (304)..(305): n is a, c, g, or t
acagtctggttctgggacagccaggaggggtgtggggggctgcatacagcttgctgcactctccggtgtcctgttgtatntntgtgtangnnnnnnnnnnnnnnnngctgttgaagaaatattaaaaggtcaatgcgtacagcaggtgtagagantccntcagttccgcttcatcactttttttttttttttttngtgcccagaagaatataataaagntcctttctaatgtacttgtgctggagaacacttgaatanatggactgtttttgtgcaaaaagaaaaacggaaaaaaaaaaaaaannaccgtcataatgtccttttgtcctgcgactcctttcccctgatgtggccactcacagtcctccagtgggctgaagtgggtgcagtttacgttgggagggtctgggaaatggatttctaaagtatctctcatatgggtgttaactaggggttgggacccaagggcagagggagtttggttcaagatcaaaaacaggttagactaaggtgaagttgtctcgtttacttccca

SEQ ID NO: 1974 - DNA, 535 bp, Mus musculus; identical to SEQ ID NO: 1973
  misc_feature (80)..(80): n is a, c, g, or t
  misc_feature (82)..(82): n is a, c, g, or t
  misc_feature (89)..(89): n is a, c, g, or t
  misc_feature (91)..(106): n is a, c, g, or t
  misc_feature (155)..(155): n is a, c, g, or t
  misc_feature (159)..(159): n is a, c, g, or t
  misc_feature (195)..(195): n is a, c, g, or t
  misc_feature (219)..(219): n is a, c, g, or t
  misc_feature (258)..(258): n is a, c, g, or t
  misc_feature (304)..(305): n is a, c, g, or t

SEQ ID NO: 1975 - DNA, 100 bp, Mus musculus
acataattatgcagcagggaaattctcagtggtaatattgtaaaaccaaccaaacaaaaaaacccccaaaaccagtcatggcagtaagctgtgatcagga

SEQ ID NO: 1976 - DNA, 100 bp, Mus musculus; identical to SEQ ID NO: 1975

SEQ ID NO: 1977 - DNA, 397 bp, Mus musculus
  misc_feature (73)..(73): n is a, c, g, or t
  misc_feature (93)..(112): n is a, c, g, or t
  misc_feature (129)..(129): n is a, c, g, or t
  misc_feature (138)..(139): n is a, c, g, or t
  misc_feature (141)..(141): n is a, c, g, or t
  misc_feature (143)..(143): n is a, c, g, or t
  misc_feature (146)..(146): n is a, c, g, or t
  misc_feature (148)..(153): n is a, c, g, or t
  misc_feature (155)..(159): n is a, c, g, or t
  misc_feature (161)..(161): n is a, c, g, or t
  misc_feature (216)..(231): n is a, c, g, or t
ctacacagccttcctgagggaaagcataaaaggatatctctaaggttgctcttcaaagccctgagctgaaggnctttgctcccgtccttggannnnnnnnnnnnnnnnnnnnatttatccaagcccttnccacttacnngnanggnannnnnnannnnngngtcgataccatctaagaccacaacttctagccatagggtatttcatatatgtccnnnnnnnnnnnnnnnncaggtgagtggtgactccaggctccatgcaggcatcttaacatgggacttccctagagagagctacagtgttcattctatgtcacagggcaggagaggagaccggcaggaaatttggagggtaacagatcaatactcctttggaaactggatgtcttactgggtgc

SEQ ID NO: 1978 - DNA, 397 bp, Mus musculus; identical to SEQ ID NO: 1977
  misc_feature (73)..(73): n is a, c, g, or t
  misc_feature (93)..(112): n is a, c, g, or t
  misc_feature (129)..(129): n is a, c, g, or t
  misc_feature (138)..(139): n is a, c, g, or t
  misc_feature (141)..(141): n is a, c, g, or t
  misc_feature (143)..(143): n is a, c, g, or t
  misc_feature (146)..(146): n is a, c, g, or t
  misc_feature (148)..(153): n is a, c, g, or t
  misc_feature (155)..(159): n is a, c, g, or t
  misc_feature (161)..(161): n is a, c, g, or t
  misc_feature (216)..(231): n is a, c, g, or t

SEQ ID NO: 1979 - DNA, 421 bp, Mus musculus
ggctttgaactcaggatctaccagcctcagcctcattagtagctgggatttcaggactgtgctctgggcagattcctggtccccttctctctggtgccttccatttgctgggcgagcaccctccaccttctgccaccctgattcagatgtctcgtggtaactgttcagaaaaataaaagaacagatccaaacattcctaggctccaccctagacgttctggttcagggcacctggaaaagggcccaagtatctgctgtaaaagtccctgtggatcacagggtcggccagatcagagccagcagcctcgggaactcatgttttcctctccacttgttcgtctacccaaagagctggatgagtataggaacacactgggttcctcagcagatccagaaaacgtaaaggcagtgttctgagggc

SEQ ID NO: 1980 - DNA, 421 bp, Mus musculus; identical to SEQ ID NO: 1979

SEQ ID NO: 1981 - DNA, 347 bp, Mus musculus
  misc_feature (37)..(66): n is a, c, g, or t
  misc_feature (70)..(88): n is a, c, g, or t
gccttcaaagttagagttagttcttgtcccagcaagnnnnnnnnnnnnnnnnnnnnnnnnnnnnnntagnnnnnnnnnnnnnnnnnnncctgggcggcaacctgggtgtatgcagagtgaaggctggccctcctccttgcttccatagatctgagtatatgttcagcctcccccagctccgccctgggagacccctgtgtctcagatcgtttccccatctttgtgtctctacaacggtggagatagtgatcaccaggtgatggttaggcatgccctgtcttcccaccctacctctggttatccctgcatgccaagtggggttgctcctagtagttgttctctacgct

SEQ ID NO: 1982 - DNA, 347 bp, Mus musculus; identical to SEQ ID NO: 1981
  misc_feature (37)..(66): n is a, c, g, or t
  misc_feature (70)..(88): n is a, c, g, or t

SEQ ID NO: 1983 - DNA, 407 bp, Mus musculus
  misc_feature (100)..(100): n is a, c, g, or t
  misc_feature (105)..(106): n is a, c, g, or t
  misc_feature (121)..(121): n is a, c, g, or t
  misc_feature (138)..(138): n is a, c, g, or t
  misc_feature (180)..(180): n is a, c, g, or t
  misc_feature (189)..(207): n is a, c, g, or t
  misc_feature (210)..(210): n is a, c, g, or t
  misc_feature (212)..(212): n is a, c, g, or t
  misc_feature (215)..(216): n is a, c, g, or t
  misc_feature (219)..(219): n is a, c, g, or t
  misc_feature (222)..(222): n is a, c, g, or t
  misc_feature (227)..(227): n is a, c, g, or t
  misc_feature (259)..(259): n is a, c, g, or t
  misc_feature (275)..(275): n is a, c, g, or t
  misc_feature (290)..(290): n is a, c, g, or t
  misc_feature (376)..(376): n is a, c, g, or t
ctctggctgtattagggaacacagctcacttctgtgggaatggcccccacatctcagttgtctggggcccttgagattaaaatactgctcttttttcctncctgnncaattgtatcttaancaatttgtcatccctgnaagaaggttctattagctttctgggactataatgaagaactncaagttagnnnnnnnnnnnnnnnnnnnacntnccnntcncantcccngacaccagaagtctaaaagtattaacaaaatnttgcttcttaaagttntgggcaggaactctntcctggcttctaccaaggaagcgtccagctttccctggttttcagacacagcataatttctaattgtaattctttatcgtctgctntctgttgtatccaaatttctctttgtgaatg

SEQ ID NO: 1984 - DNA, 407 bp, Mus musculus; identical to SEQ ID NO: 1983
  misc_feature (100)..(100): n is a, c, g, or t
  misc_feature (105)..(106): n is a, c, g, or t
  misc_feature (121)..(121): n is a, c, g, or t
  misc_feature (138)..(138): n is a, c, g, or t
  misc_feature (180)..(180): n is a, c, g, or t
  misc_feature (189)..(207): n is a, c, g, or t
  misc_feature (210)..(210): n is a, c, g, or t
  misc_feature (212)..(212): n is a, c, g, or t
  misc_feature (215)..(216): n is a, c, g, or t
  misc_feature (219)..(219): n is a, c, g, or t
  misc_feature (222)..(222): n is a, c, g, or t
  misc_feature (227)..(227): n is a, c, g, or t
  misc_feature (259)..(259): n is a, c, g, or t
  misc_feature (275)..(275): n is a, c, g, or t
  misc_feature (290)..(290): n is a, c, g, or t
  misc_feature (376)..(376): n is a, c, g, or t

SEQ ID NO: 1985 - DNA, 526 bp, Mus musculus
  misc_feature (301)..(301): n is a, c, g, or t
  misc_feature (394)..(394): n is a, c, g, or t
  misc_feature (423)..(423): n is a, c, g, or t
  misc_feature (467)..(467): n is a, c, g, or t
agccctcatggagctcgtccttgctgccagggaccaggcggctgcagaacagccctaggcatcctggcaggacctggagtagggaagaaagcaacccttgtcctccgggtcacccagcaacagcctgtacctccgcccacttatatgggccatctttcaccaagaaagaaccaaaagcctttccattgtatggaagatagtttttaagacattcaaagctttttgctctagtttacagaacaaattgttttatttttattgtaaatcttagtgtagaccagctgatgtctacaatatggtnaaagtaaatcgacaagtgtggctggtgggctgtcctggccctgcagggcaagcactgggcaggatgcaccaatgcagagtagaactttgattntccccaaccctccgacctgggagatactntcagccctgggcctccttagaggctacaaagtggcccgtccatntgggcacagaagagtagcacttccaatcttgccaatccgcacctctgtcagagccagag

SEQ ID NO: 1986 - DNA, 526 bp, Mus musculus; identical to SEQ ID NO: 1985
  misc_feature (301)..(301): n is a, c, g, or t
  misc_feature (394)..(394): n is a, c, g, or t
  misc_feature (423)..(423): n is a, c, g, or t
  misc_feature (467)..(467): n is a, c, g, or t

SEQ ID NO: 1987 - DNA, 420 bp, Mus musculus
  misc_feature (109)..(109): n is a, c, g, or t
  misc_feature (112)..(112): n is a, c, g, or t
  misc_feature (129)..(129): n is a, c, g, or t
  misc_feature (137)..(137): n is a, c, g, or t
  misc_feature (147)..(147): n is a, c, g, or t
  misc_feature (156)..(156): n is a, c, g, or t
  misc_feature (164)..(164): n is a, c, g, or t
  misc_feature (172)..(172): n is a, c, g, or t
  misc_feature (177)..(177): n is a, c, g, or t
  misc_feature (183)..(183): n is a, c, g, or t
  misc_feature (189)..(189): n is a, c, g, or t
  misc_feature (200)..(216): n is a, c, g, or t
  misc_feature (225)..(225): n is a, c, g, or t
  misc_feature (228)..(228): n is a, c, g, or t
  misc_feature (258)..(298): n is a, c, g, or t
  misc_feature (323)..(323): n is a, c, g, or t
  misc_feature (335)..(335): n is a, c, g, or t
  misc_feature (339)..(343): n is a, c, g, or t
  misc_feature (347)..(347): n is a, c, g, or t
  misc_feature (349)..(349): n is a, c, g, or t
  misc_feature (351)..(352): n is a, c, g, or t
  misc_feature (354)..(354): n is a, c, g, or t
  misc_feature (356)..(356): n is a, c, g, or t
  misc_feature (358)..(358): n is a, c, g, or t
  misc_feature (361)..(364): n is a, c, g, or t
  misc_feature (367)..(367): n is a, c, g, or t
  misc_feature (370)..(370): n is a, c, g, or t
  misc_feature (372)..(373): n is a, c, g, or t
  misc_feature (376)..(376): n is a, c, g, or t
  misc_feature (395)..(395): n is a, c, g, or t
aagatccacgagacgcagccgttgctcaatctcaaactggatcgggtcatgcaggacatagtgtataagctagtgccaggcttgcaagacagtgaagagaaacggattnggnaattctatcagtcccgnaggcttanacagagtctncccagcccnagtggtgnaagagccnagccntgagcnaccttnggcctcccctnnnnnnnnnnnnnnnnnactctaaanccnactattatcgatatgatgaacagctgagcnnnnnnnnnnnnnnnnnnnnnnnnnnnnnnnnnnnnnnnnnaaatgtccttcagaacaagtatgtncggtgttctgtnagannnnnggtncncnntntncnaannnntcngtntnnccnactaatgctaaatccacancatgtacagctcctttttgacaatg

SEQ ID NO: 1988 - DNA, 420 bp, Mus musculus; identical to SEQ ID NO: 1987
  misc_feature (109)..(109): n is a, c, g, or t
  misc_feature (112)..(112): n is a, c, g, or t
  misc_feature (129)..(129): n is a, c, g, or t
  misc_feature (137)..(137): n is a, c, g, or t
  misc_feature (147)..(147): n is a, c, g, or t
  misc_feature (156)..(156): n is a, c, g, or t
  misc_feature (164)..(164): n is a, c, g, or t
  misc_feature (172)..(172): n is a, c, g, or t
  misc_feature (177)..(177): n is a, c, g, or t
  misc_feature (183)..(183): n is a, c, g, or t
  misc_feature (189)..(189): n is a, c, g, or t
  misc_feature (200)..(216): n is a, c, g, or t
  misc_feature (225)..(225): n is a, c, g, or t
  misc_feature (228)..(228): n is a, c, g, or t
  misc_feature (258)..(298): n is a, c, g, or t
  misc_feature (323)..(323): n is a, c, g, or t
  misc_feature (335)..(335): n is a, c, g, or t
  misc_feature (339)..(343): n is a, c, g, or t
  misc_feature (347)..(347): n is a, c, g, or t
  misc_feature (349)..(349): n is a, c, g, or t
  misc_feature (351)..(352): n is a, c, g, or t
  misc_feature (354)..(354): n is a, c, g, or t
  misc_feature (356)..(356): n is a, c, g, or t
  misc_feature (358)..(358): n is a, c, g, or t
  misc_feature (361)..(364): n is a, c, g, or t
  misc_feature (367)..(367): n is a, c, g, or t
  misc_feature (370)..(370): n is a, c, g, or t
  misc_feature (372)..(373): n is a, c, g, or t
  misc_feature (376)..(376): n is a, c, g, or t
  misc_feature (395)..(395): n is a, c, g, or t

SEQ ID NO: 1989 - DNA, 417 bp, Mus musculus
  misc_feature (201)..(202): n is a, c, g, or t
  misc_feature (303)..(318): n is a, c, g, or t
  misc_feature (351)..(365): n is a, c, g, or t
  misc_feature (380)..(380): n is a, c, g, or t
accgagcctgtagagtagctgctgggaggaggcggccacccggccctgtcacacagcagcccctccccctcccctcctgtggcccatgcagaggaaggaagggcagcctaaagtccacttagaaatgtttggatatgccactgtaattcttttcaaaatagcattccccaagtttttaatgggagaaaaaaaaaaaaaaanntttactattgagaatgctgcaatctgctgcttgggaaggtctctgtgtggccgaagaacctgcttccacagccgccgcgctgccaggctctctaggggccnnnnnnnnnnnnnnnncaggctctccttattacacatgctccttttttnnnnnnnnnnnnnnngcacttttgatattntgatattatatttgcttccttaattccttgcatagag

SEQ ID NO: 1990 - DNA, 417 bp, Mus musculus; identical to SEQ ID NO: 1989
  misc_feature (201)..(202): n is a, c, g, or t
  misc_feature (303)..(318): n is a, c, g, or t
  misc_feature (351)..(365): n is a, c, g, or t
  misc_feature (380)..(380): n is a, c, g, or t

SEQ ID NO: 1991 - DNA, 91 bp, Mus musculus
tcatggtcctgtagctgtccgtcctggctctgatgtgttgacctgcgtcaactcaaggtagagctgtgctccatggtgtgtagctagactt

SEQ ID NO: 1992 - DNA, 91 bp, Mus musculus; identical to SEQ ID NO: 1991

SEQ ID NO: 1993 - DNA, 457 bp, Mus musculus
  misc_feature (72)..(72): n is a, c, g, or t
  misc_feature (195)..(197): n is a, c, g, or t
  misc_feature (199)..(209): n is a, c, g, or t
  misc_feature (221)..(221): n is a, c, g, or t
  misc_feature (358)..(359): n is a, c, g, or t
  misc_feature (361)..(362): n is a, c, g, or t
  misc_feature (365)..(367): n is a, c, g, or t
  misc_feature (402)..(402): n is a, c, g, or t
  misc_feature (404)..(404): n is a, c, g, or t
  misc_feature (417)..(417): n is a, c, g, or t
  misc_feature (429)..(429): n is a, c, g, or t
gggcaaaattcactgacgtcctgtccagcccagtgactgaggaccaggaaccctgctagccctgcctctggngtcctatctccttctgccttctctggcccagtgtgtgtgggaggagggtgatggttatgggtggcaccaggttccccagctacctctctccccatgttttagataaattaacactgcctggannnannnnnnnnnnnccctgcagagcnccaagaccagggtcaggcatggggaggtactccagggatgccggtgacctctctgggaaggctgtagtctattctctgttagggaataacttagagtacaaacagataagctttcagacaggctttgacaatctttnngnnccnnncatttggacatgctaatagcttgatttgtcccccngngcagccaacctgngctctcagcctngggaccagactgcccaaaggtactgctg

SEQ ID NO: 1994 - DNA, 457 bp, Mus musculus; identical to SEQ ID NO: 1993
  misc_feature (72)..(72): n is a, c, g, or t
  misc_feature (195)..(197): n is a, c, g, or t
  misc_feature (199)..(209): n is a, c, g, or t
  misc_feature (221)..(221): n is a, c, g, or t
  misc_feature (358)..(359): n is a, c, g, or t
  misc_feature (361)..(362): n is a, c, g, or t
  misc_feature (365)..(367): n is a, c, g, or t
  misc_feature (402)..(402): n is a, c, g, or t
  misc_feature (404)..(404): n is a, c, g, or t
  misc_feature (417)..(417): n is a, c, g, or t
  misc_feature (429)..(429): n is a, c, g, or t

SEQ ID NO: 1995 - DNA, 284 bp, Mus musculus
acctggtcatggaagtattgtagtcccagcctctcagaagactgagacaggatgtcttgccagccttgataaaacacggtaaaaacctgtctctgagtaagtgttcctgtcccactcaacatgctcagtatgtctgaggtgtcattgtgactcttgatgaacaggaaccactacagattcctagaacatttgtccccagctccacaaggtgaacaccattagggccaaacactagaattttggtgtggtctttccgttatttcgcgtcttaagtattttatggc

SEQ ID NO: 1996 - DNA, 284 bp, Mus musculus; identical to SEQ ID NO: 1995

SEQ ID NO: 1997 - DNA, 318 bp, Mus musculus
  misc_feature (233)..(233): n is a, c, g, or t
ctcggtttgggcaagcggccctttgggaagtgggaatgtccttggcatcactgtgatgtatgtggcaaaccttctacctcattttgccacctctgccccaactcattctgtaaggaacaccaagatgggactgctttccgttccacccaggatgggcagtcctactgctgtgagcatgacttgagggcagactcttcaagtagcaccaagactgagaaaccctttccagaatnactgaagtcaaaaggaaagaggaagaaaaggcggtgctggcgaagggtcacagatggcaaatagcgcttggtcagatcctggggt

SEQ ID NO: 1998 - DNA, 318 bp, Mus musculus; identical to SEQ ID NO: 1997
  misc_feature (233)..(233): n is a, c, g, or t

SEQ ID NO: 1999 - DNA, 567 bp, Mus musculus
  misc_feature (43)..(43): n is a, c, g, or t
  misc_feature (269)..(300): n is a, c, g, or t
  misc_feature (320)..(321): n is a, c, g, or t
  misc_feature (324)..(371): n is a, c, g, or t
tggccaccactgagtcaccctagggctctgtgaggctgcgtgnttggccagtcccctccgtgcaagtgtacataggagctgtaaatacacagcaggggcatgccttcctgccggtggccttttctgctcctgcctggccatcccacactgggaggcagcgctggctgggatcgggcagtgaggtaacagatccccagggcccagactcttacaactgtacataatatttttcaagcagagagaaatgcatatattttaaatggaatttnnnnnnnnnnnnnnnnnnnnnnnnnnnnnnnntaggggaaggccttcgggcnncannnnnnnnnnnnnnnnnnnnnnnnnnnnnnnnnnnnnnnnnnnnnnnntgggctctgtaactattaacctctttccccaactaacatcaatgaaagagtcattccacatgactgggctgtgtttgcatctgtgcagcaaacctccaagtccgggggtatcccttcaccccgtcctgggggccactcatcagtgtagagtgccgagagctgcagccctgggagggagcctttcctggctgtttca

SEQ ID NO: 2000 - DNA, 567 bp, Mus musculus; identical to SEQ ID NO: 1999
  misc_feature (43)..(43): n is a, c, g, or t
  misc_feature (269)..(300): n is a, c, g, or t
  misc_feature (320)..(321): n is a, c, g, or t
  misc_feature (324)..(371): n is a, c, g, or t

SEQ ID NO: 2001 - DNA, 333 bp, Mus musculus
tcccggtattgcttcggcaccggctgcgcccgccgcctgaggagacctatgctctacaccgcaagctagctgggactttcttagcctgtgcccgtctccacgcccacatcgcctgccgggacctcttccaagatacctaccaccgctactgggccagtcgccagacactgccgctgccagcagcctcctgactagggacctccctgccgaccccaccatgacagattccatccagggataccagctccacagcaggcagtcccctcctcctctttcttggtctccagaacctagtttcttgccttggatctttgggcccctggagttagctcc

SEQ ID NO: 2002 - DNA, 333 bp, Mus musculus; identical to SEQ ID NO: 2001

SEQ ID NO: 2003 - DNA, 350 bp, Mus musculus
  misc_feature (113)..(113): n is a, c, g, or t
  misc_feature (117)..(117): n is a, c, g, or t
gagagttccagatcccctggagacgcctggtgtggatgctggaaacccaccttgggtccctctggaacagcagcaagtactattaaccactgaaccttctctccagctttganaaanattttaaacaaggtttcagtttatagaatgggctatcatcactggcaattcttctacctcaacctgagtgactccaaacaatttttgtggaattgtatatgtacatatacataaaaacatttttaaaaaagagactgggcatcatagctcacatctataaccccagcacctgggaagctgaggcaggaatacctcaattttgaggcaaggtgggccacagagtaagtgaatac

SEQ ID NO: 2004 - DNA, 350 bp, Mus musculus; identical to SEQ ID NO: 2003
  misc_feature (113)..(113): n is a, c, g, or t
  misc_feature (117)..(117): n is a, c, g, or t

SEQ ID NO: 2005 - DNA, 460 bp, Mus musculus
  misc_feature (37)..(57): n is a, c, g, or t
  misc_feature (113)..(113): n is a, c, g, or t
  misc_feature (360)..(360): n is a, c, g, or t
ggctcatacaggagggaatctagtgccctgtggtgannnnnnnnnnnnnnnnnnnnngcagctactgagaggacaggacagtgcagctgcccgctgtaggagcagtgagctgntgccgggctagaccagggccaccagcggaacctggagatgtaggcttatttaaaggcagcctcagaggcaaattctttgcctgagatgcctcacatctcatcctggcaggtgtgggctgggagaccctggaggggccatcatttggctttttcttgagtctctgggactctgcacagaggccacctacacctggatctcctttttggacttaagagctctctcctcccccagtcctaggcagctgcntgagcttgggactcttgctttcccaagactccaacttctagccgctgttttggtcctggcgtgggggttggacccagcctctttcccttgctgcagttac

SEQ ID NO: 2006 - DNA, 460 bp, Mus musculus; identical to SEQ ID NO: 2005
  misc_feature (37)..(57): n is a, c, g, or t
  misc_feature (113)..(113): n is a, c, g, or t
  misc_feature (360)..(360): n is a, c, g, or t

SEQ ID NO: 2007 - DNA, 378 bp, Mus musculus
  misc_feature (167)..(184): n is a, c, g, or t
  misc_feature (232)..(232): n is a, c, g, or t
  misc_feature (237)..(237): n is a, c, g, or t
  misc_feature (335)..(349): n is a, c, g, or t
gaattcattcgatgccacatttgaacacataagatttcaaagctacattttaccacaactccagggtggggattaaaagtcaggaaagcaggtggttgtctgttcgactgccaccggcctcgaagggatggttaccaatatgaatggcaccgggcgaggacagaggnnnnnnnnnnnnnnnnnnggacgcggccgctgtcagggtccaagatgccacctggccctggggcanacacnaccccgatctctcaggcctgctcccgggccccagggctccctcccggccttgcccgacgtcgggaccggttacctgcaccgctgcgggcgccgagcgnnnnnnnnnnnnnnncagcagcccggaagcctgccgcaagggtc

SEQ ID NO: 2008 - DNA, 378 bp, Mus musculus; identical to SEQ ID NO: 2007
  misc_feature (167)..(184): n is a, c, g, or t
  misc_feature (232)..(232): n is a, c, g, or t
  misc_feature (237)..(237): n is a, c, g, or t
  misc_feature (335)..(349): n is a, c, g, or t

SEQ ID NO: 2009 - DNA, 549 bp, Mus musculus
  misc_feature (94)..(103): n is a, c, g, or t
  misc_feature (107)..(107): n is a, c, g, or t
  misc_feature (109)..(110): n is a, c, g, or t
  misc_feature (113)..(114): n is a, c, g, or t
  misc_feature (116)..(116): n is a, c, g, or t
  misc_feature (119)..(119): n is a, c, g, or t
  misc_feature (125)..(125): n is a, c, g, or t
  misc_feature (133)..(133): n is a, c, g, or t
  misc_feature (141)..(141): n is a, c, g, or t
  misc_feature (149)..(149): n is a, c, g, or t
  misc_feature (172)..(172): n is a, c, g, or t
  misc_feature (179)..(179): n is a, c, g, or t
  misc_feature (183)..(183): n is a, c, g, or t
  misc_feature (194)..(195): n is a, c, g, or t
  misc_feature (326)..(326): n is a, c, g, or t
  misc_feature (339)..(339): n is a, c, g, or t
  misc_feature (344)..(344): n is a, c, g, or t
  misc_feature (348)..(348): n is a, c, g, or t
  misc_feature (350)..(351): n is a, c, g, or t
  misc_feature (355)..(355): n is a, c, g, or t
  misc_feature (361)..(361): n is a, c, g, or t
  misc_feature (365)..(365): n is a, c, g, or t
  misc_feature (368)..(368): n is a, c, g, or t
  misc_feature (373)..(373): n is a, c, g, or t
  misc_feature (377)..(380): n is a, c, g, or t
  misc_feature (382)..(396): n is a, c, g, or t
  misc_feature (398)..(398): n is a, c, g, or t
  misc_feature (404)..(404): n is a, c, g, or t
  misc_feature (409)..(409): n is a, c, g, or t
  misc_feature (418)..(447): n is a, c, g, or t
  misc_feature (450)..(450): n is a, c, g, or t
  misc_feature (457)..(457): n is a, c, g, or t
  misc_feature (459)..(459): n is a, c, g, or t
  misc_feature (479)..(493): n is a, c, g, or t
aatgaccacttcatccacgccaaggccatgcggaaggttcgggaggtacgggcccagcttaaggatattatggtgcagcagcggatgagcctgnnnnnnnnnngcancnnctnngncantgtcanggtccacnaagatctncactccanggacggaaagagcagggggagcncatgacncctncgccgcacgcnngcccgctttggactgtgagctgaggctgtcccaggggaggatggtggccacgtactaagatcttggctctccagcccgtgtttcctaaggactccgcagacaaggctttcacctgcgtgttcatctgtggntcatcgaggctgnagcanttcntnntgantcaggntctntcntagantggnnnntnnnnnnnnnnnnnnnancaggancctantgcagggtnnnnnnnnnnnnnnnnnnnnnnnnnnnnnnggntggaccntngtacccacgtaacctgcccnnnnnnnnnnnnnnntggggctgagacttttttaatccttgtgtaaagaagcgagatcgaggcagagaaac

SEQ ID NO: 2010 - DNA, 549 bp, Mus musculus; identical to SEQ ID NO: 2009
  misc_feature (94)..(103): n is a, c, g, or t
  misc_feature (107)..(107): n is a, c, g, or t
  misc_feature (109)..(110): n is a, c, g, or t
  misc_feature (113)..(114): n is a, c, g, or t
  misc_feature (116)..(116): n is a, c, g, or t
  misc_feature (119)..(119): n is a, c, g, or t
  misc_feature (125)..(125): n is a, c, g, or t
  misc_feature (133)..(133): n is a, c, g, or t
  misc_feature (141)..(141): n is a, c, g, or t
  misc_feature (149)..(149): n is a, c, g, or t
  misc_feature (172)..(172): n is a, c, g, or t
  misc_feature (179)..(179): n is a, c, g, or t
  misc_feature (183)..(183): n is a, c, g, or t
  misc_feature (194)..(195): n is a, c, g, or t
  misc_feature (326)..(326): n is a, c, g, or t
  misc_feature (339)..(339): n is a, c, g, or t
  misc_feature (344)..(344): n is a, c, g, or t
  misc_feature (348)..(348): n is a, c, g, or t
  misc_feature (350)..(351): n is a, c, g, or t
  misc_feature (355)..(355): n is a, c, g, or t
  misc_feature (361)..(361): n is a, c, g, or t
  misc_feature (365)..(365): n is a, c, g, or t
  misc_feature (368)..(368): n is a, c, g, or t
  misc_feature (373)..(373): n is a, c, g, or t
  misc_feature (377)..(380): n is a, c, g, or t
  misc_feature (382)..(396): n is a, c, g, or t
  misc_feature (398)..(398): n is a, c, g, or t
  misc_feature (404)..(404): n is a, c, g, or t
  misc_feature (409)..(409): n is a, c, g, or t
  misc_feature (418)..(447): n is a, c, g, or t
  misc_feature (450)..(450): n is a, c, g, or t
  misc_feature (457)..(457): n is a, c, g, or t
  misc_feature (459)..(459): n is a, c, g, or t
  misc_feature (479)..(493): n is a, c, g, or t

SEQ ID NO: 2011 - DNA, 392 bp, Mus musculus
  misc_feature (136)..(137): n is a, c, g, or t
  misc_feature (304)..(304): n is a, c, g, or t
agcaatgtgctcgagagtacccctccctttcctcacagatcattgagaggtgaagcaagcacactcattttcaggggcttccccagatgtgtggagtgaggggatatggtgactgtgcccttcaaattatggatgnnaaaaaaaaaaaagtacagaagggaaggagactttaggcaggattatttttgaatgaaagatcagattaatgttttcccttccgctcacagtccccgttggtctggtgtcatgtagcatagtgcgtctatagcacatggtatttaaagactaatgaatgcaaagagantaatttgggggctgtttcttatatatggtactaggaaatgccttgttggcaaagcacaccttgggtagttgagatctcctgtgttcgt

SEQ ID NO: 2012 - DNA, 392 bp, Mus musculus; identical to SEQ ID NO: 2011
  misc_feature (136)..(137): n is a, c, g, or t
  misc_feature (304)..(304): n is a, c, g, or t

SEQ ID NO: 2013 - DNA, 340 bp, Mus musculus
  misc_feature (71)..(71): n is a, c, g, or t
  misc_feature (143)..(157): n is a, c, g, or t
  misc_feature (181)..(181): n is a, c, g, or t
  misc_feature (183)..(184): n is a, c, g, or t
  misc_feature (186)..(187): n is a, c, g, or t
  misc_feature (301)..(301): n is a, c, g, or t
ctgaacagacacagcgaggcaggttggagctgggaaactcgaggggaagggcagaggaaaggccctactgnagtcttcctagaatggagcatcccagaaagcaaaggcaggaggaggtgaggcccaagctgctaaggcaccannnnnnnnnnnnnnnaggtgtgctaggccagctagggcngnncnnggcctatggaaaggaaggggctccagggagcatcaagggttaaagtatttggatcgtggcagtagctcctggctctaaagaggctttctgtactggagtagttgtttggaattntcaggtaaactggaaccacgttggcctgtgaccataaag

SEQ ID NO: 2014 - DNA, 340 bp, Mus musculus; identical to SEQ ID NO: 2013
  misc_feature (71)..(71): n is a, c, g, or t
  misc_feature (143)..(157): n is a, c, g, or t
  misc_feature (181)..(181): n is a, c, g, or t
  misc_feature (183)..(184): n is a, c, g, or t
  misc_feature (186)..(187): n is a, c, g, or t
  misc_feature (301)..(301): n is a, c, g, or t

SEQ ID NO: 2015 - DNA, 205 bp, Mus musculus
ttatgttggactaggggtgctgccaaggaggcctccgccttggagcttagcagctcaggtccctcctcttcccactttgcagggcaggagcgtctcgaaagttccttggtggggacgaagttcggctgatagcaggagtctggaacccctgacgcttacaacttccagcctccctctaatgagactcttgggagctgtgcacaaa

SEQ ID NO: 2016 - DNA, 205 bp, Mus musculus; identical to SEQ ID NO: 2015

SEQ ID NO: 2017 - DNA, 314 bp, Mus musculus
  misc_feature (81)..(100): n is a, c, g, or t
  misc_feature (107)..(107): n is a, c, g, or t
  misc_feature (130)..(130): n is a, c, g, or t
  misc_feature (264)..(264): n is a, c, g, or t
  misc_feature (288)..(288): n is a, c, g, or t
tcatgcgttgactgtatgcattttctgcacattgtgtttgtttgagatgtggtgtgtaagatacacgcttccagatggaannnnnnnnnnnnnnnnnnnnctactcntaacataatgagaacctcaagantatcaggagaaatatttaaatttccattttatgaagaaaggaaccaaattattagttacgctttttaaagaaattaccagtttacataattaatcagggtgcatttaagttctaactttgtgttatatgatgcntcatttgaaaatactgaggcactntcctttgtgctgaatgatgcatgtgt

SEQ ID NO: 2018 - DNA, 314 bp, Mus musculus; identical to SEQ ID NO: 2017
  misc_feature (81)..(100): n is a, c, g, or t
  misc_feature (107)..(107): n is a, c, g, or t
  misc_feature (130)..(130): n is a, c, g, or t
  misc_feature (264)..(264): n is a, c, g, or t
  misc_feature (288)..(288): n is a, c, g, or t

SEQ ID NO: 2019 - DNA, 353 bp, Mus musculus
  misc_feature (60)..(60): n is a, c, g, or t
  misc_feature (151)..(152): n is a, c, g, or t
  misc_feature (222)..(236): n is a, c, g, or t
  misc_feature (254)..(254): n is a, c, g, or t
  misc_feature (256)..(256): n is a, c, g, or t
  misc_feature (304)..(304): n is a, c, g, or t
  misc_feature (306)..(306): n is a, c, g, or t
gtcatcggtccattttatgagttaacaatgtattttgttgagcaaagtttttaagggttnttttgggttcttttattttgatggtgatgtttgattttcttttagtttctgagggggaatatttttctatacatatccaataatgccttcnntctgaatgtaaaataagtacccatgatttctattatagtaccagtgtaattatttaagaaaaaaagattnnnnnnnnnnnnnnnatgaccaattaatgtcantntagtgcttaggctgcgaccctatggtagcaattgtgtgctggtaaaantnttacttataaagtaggaacaaagaaccgaggaagcacgtgaaaactt

SEQ ID NO: 2020 - DNA, 353 bp, Mus musculus; identical to SEQ ID NO: 2019
  misc_feature (60)..(60): n is a, c, g, or t
  misc_feature (151)..(152): n is a, c, g, or t
  misc_feature (222)..(236): n is a, c, g, or t
  misc_feature (254)..(254): n is a, c, g, or t
  misc_feature (256)..(256): n is a, c, g, or t
  misc_feature (304)..(304): n is a, c, g, or t
  misc_feature (306)..(306): n is a, c, g, or t

SEQ ID NO: 2021 - DNA, 419 bp, Mus musculus
  misc_feature (59)..(59): n is a, c, g, or t
  misc_feature (63)..(63): n is a, c, g, or t
  misc_feature (69)..(69): n is a, c, g, or t
  misc_feature (297)..(332): n is a, c, g, or t
  misc_feature (334)..(334): n is a, c, g, or t
  misc_feature (337)..(337): n is a, c, g, or t
  misc_feature (339)..(356): n is a, c, g, or t
  misc_feature (358)..(358): n is a, c, g, or t
  misc_feature (360)..(361): n is a, c, g, or t
  misc_feature (364)..(364): n is a, c, g, or t
  misc_feature (373)..(373): n is a, c, g, or t
  misc_feature (378)..(378): n is a, c, g, or t
  misc_feature (380)..(380): n is a, c, g, or t
tctgtgtggctcctgcccaggtgtttctggccaggaaggtatagacaactatgggcctnggcnacccgnccttcagtaagaccttccctagggaacagacagctgggtacctgggtgccaggcaagacaagactcttacaaggagaggactaaaggtctcatctgcccagggtgtcactggagagtcgttcctgtaaatggcttaaccttggcttcctgaaccagtccctccctagtctatcttctatccccttttaaggcccagaccaggtgtgggtccttgtgcatagcagactnnnnnnnnnnnnnnnnnnnnnnnnnnnnnnnnnnnnantcnannnnnnnnnnnnnnnnnntntnnttnttccagacnaaatncntccctgtggagttgcagttgaatgacaaccctgtacgtt

SEQ ID NO: 2022 - DNA, 419 bp, Mus musculus; identical to SEQ ID NO: 2021
  misc_feature (59)..(59): n is a, c, g, or t
  misc_feature (63)..(63): n is a, c, g, or t
  misc_feature (69)..(69): n is a, c, g, or t
  misc_feature (297)..(332): n is a, c, g, or t
  misc_feature (334)..(334): n is a, c, g, or t
  misc_feature (337)..(337): n is a, c, g, or t
  misc_feature (339)..(356): n is a, c, g, or t
  misc_feature (358)..(358): n is a, c, g, or t
  misc_feature (360)..(361): n is a, c, g, or t
  misc_feature (364)..(364): n is a, c, g, or t
  misc_feature (373)..(373): n is a, c, g, or t
  misc_feature (378)..(378): n is a, c, g, or t
  misc_feature (380)..(380): n is a, c, g, or t

SEQ ID NO: 2023 - DNA, 360 bp, Mus musculus
  misc_feature (73)..(78): n is a, c, g, or t
  misc_feature (80)..(81): n is a, c, g, or t
  misc_feature (83)..(86): n is a, c, g, or t
  misc_feature (88)..(88): n is a, c, g, or t
  misc_feature (157)..(157): n is a, c, g, or t
  misc_feature (169)..(169): n is a, c, g, or t
  misc_feature (182)..(183): n is a, c, g, or t
  misc_feature (188)..(188): n is a, c, g, or t
  misc_feature (192)..(192): n is a, c, g, or t
  misc_feature (197)..(213): n is a, c, g, or t
  misc_feature (268)..(268): n is a, c, g, or t
gtggtcacgttaaccctctctcacattctagatgggaaaactcatgattcagacccaaggaaagatctgtggnnnnnncnnannnntnggcatgcacagcaggcatgtccacttcaactccgtgtctctctcaaaacagaaaggtttgagattcagnagaaaggaatangaagaagccactnntcccncaantctcnnnnnnnnnnnnnnnnngtgcaccagcagccagagcacagggtcaggggccgaagggttacctcttagcttnttttaagtgctgagttgatgtttggcctctgtgggttgctacctttccctctgtgttataacttccttccttcccttcaatgctttgtgagt

SEQ ID NO: 2024 - DNA, 360 bp, Mus musculus; identical to SEQ ID NO: 2023
  misc_feature (73)..(78): n is a, c, g, or t
  misc_feature (80)..(81): n is a, c, g, or t
  misc_feature (83)..(86): n is a, c, g, or t
  misc_feature (88)..(88): n is a, c, g, or t
  misc_feature (157)..(157): n is a, c, g, or t
  misc_feature (169)..(169): n is a, c, g, or t
  misc_feature (182)..(183): n is a, c, g, or t
  misc_feature (188)..(188): n is a, c, g, or t
  misc_feature (192)..(192): n is a, c, g, or t
  misc_feature (197)..(213): n is a, c, g, or t
  misc_feature (268)..(268): n is a, c, g, or t

SEQ ID NO: 2025 - DNA, 222 bp, Mus musculus
agcgcctaagcctccggttttggtgtctccatccgggtctcctcagccgaagcctgggccaccccaggcacggatgcaggatgagcctgagcttcccgggagccctgaagctacagaaacccgggtagaacgtggagggtccatctcggaagcctctggggaggagagcgtaccccttggggaccgagggtcacgcgagaagccacggaaagagaagccaag

SEQ ID NO: 2026 - DNA, 222 bp, Mus musculus; identical to SEQ ID NO: 2025

SEQ ID NO: 2027 - DNA, 462 bp, Mus musculus
  misc_feature (317)..(317): n is a, c, g, or t
  misc_feature (331)..(331): n is a, c, g, or t
  misc_feature (344)..(344): n is a, c, g, or t
  misc_feature (394)..(394): n is a, c, g, or t
  misc_feature (400)..(400): n is a, c, g, or t
  misc_feature (408)..(408): n is a, c, g, or t
ccctttcacggtaggccaggcaggccaggctcccgcggagtattccccaatttctaggctgctggaaaggcctcaactgtatcatctggttacctacgggagctctctgcaaactaggaggaacaacacggcttccattccagtagaggtaagaagactcctggcccacaccaaagcccttggataacgaatgtgttggcttctgtgttctttctgtgggaagacaagccattgttctacagctgtggcagccagcctgtgagaaatgagggttgaaagcagcgcattcttcaggagcagctgggtcaccttcctgntggcagaacctgtntgtggagagtttntcctcaacctcacatttgtcacggactaaacgtgatcatagacaaatctnttaacntcccaggnccttgaatttgtatcttaagaagaagtggttgagctggcctttgaagttgtaac

SEQ ID NO: 2028 - DNA, 462 bp, Mus musculus; identical to SEQ ID NO: 2027
  misc_feature (317)..(317): n is a, c, g, or t
  misc_feature (331)..(331): n is a, c, g, or t
  misc_feature (344)..(344): n is a, c, g, or t
  misc_feature (394)..(394): n is a, c, g, or t
  misc_feature (400)..(400): n is a, c, g, or t
  misc_feature (408)..(408): n is a, c, g, or t

SEQ ID NO: 2029 - DNA, 462 bp, Mus musculus; identical to SEQ ID NO: 2027
  misc_feature (317)..(317): n is a, c, g, or t
  misc_feature (331)..(331): n is a, c, g, or t
  misc_feature (344)..(344): n is a, c, g, or t
  misc_feature (394)..(394): n is a, c, g, or t
  misc_feature (400)..(400): n is a, c, g, or t
  misc_feature (408)..(408): n is a, c, g, or t

SEQ ID NO: 2030 - DNA, 58 bp, Mus musculus
aagcacaccaggaccaccaagcttgagcaaacagagcgctttggcttccctgtttcct

SEQ ID NO: 2031 - DNA, 58 bp, Mus musculus; identical to SEQ ID NO: 2030

SEQ ID NO: 2032 - DNA, 58 bp, Mus musculus; identical to SEQ ID NO: 2030

SEQ ID NO: 2033 - DNA, 42 bp, Mus musculus
cactctttcccgaacgtttctgtgccctagagatgtcacagt

SEQ ID NO: 2034 - DNA, 42 bp, Mus musculus; identical to SEQ ID NO: 2033

SEQ ID NO: 2035 - DNA, 42 bp, Mus musculus; identical to SEQ ID NO: 2033

SEQ ID NO: 2036 - DNA, 67 bp, Mus musculus
cgtcctgatgactaaacggattacatagtaaagaggctcctccatcgaggattccatgttgtaaaaa

SEQ ID NO: 2037 - DNA, 67 bp, Mus musculus; identical to SEQ ID NO: 2036

SEQ ID NO: 2038 - DNA, 67 bp, Mus musculus; identical to SEQ ID NO: 2036

SEQ ID NO: 2039 - DNA, 106 bp, Mus musculus
atcttggtctttacaattccgaatggggtccctgggcaggcagctccgcccggtcttggcagagcggtgctttttgaccctttgcggctggattcgaccttccctc

SEQ ID NO: 2040 - DNA, 106 bp, Mus musculus; identical to SEQ ID NO: 2039

SEQ ID NO: 2041 - DNA, 106 bp, Mus musculus; identical to SEQ ID NO: 2039

SEQ ID NO: 2042 - DNA, 147 bp, Mus musculus
tctgcccagaataaagacattagaagtagatgtgatcgaggccatgggaatccaggagattggaagattcaagaaagtttattggtattgagcttcagagtgttgattttgcctgtccagttttcactttgatggtagaggcctttt

SEQ ID NO: 2043 - DNA, 147 bp, Mus musculus; identical to SEQ ID NO: 2042

SEQ ID NO: 2044 - DNA, 147 bp, Mus musculus; identical to SEQ ID NO: 2042

SEQ ID NO: 2045 - DNA, 92 bp, Mus musculus
tttgtacacagacgccaatcccttttaccctaattcacagacagcggggaaccgaactttccatgctgagcttgcatcctaccccacttaaa

SEQ ID NO: 2046 - DNA, 92 bp, Mus musculus; identical to SEQ ID NO: 2045

SEQ ID NO: 2047 - DNA, 92 bp, Mus musculus; identical to SEQ ID NO: 2045

SEQ ID NO: 2048 - DNA, 56 bp, Mus musculus
tttctttacagcacattactagccaccggccttataccccaacggaaacatggcaa

SEQ ID NO: 2049 - DNA, 56 bp, Mus musculus; identical to SEQ ID NO: 2048

SEQ ID NO: 2050 - DNA, 56 bp, Mus musculus; identical to SEQ ID NO: 2048

SEQ ID NO: 2051 - DNA, 229 bp, Mus musculus
  misc_feature (61)..(61): n is a, c, g, or t
  misc_feature (87)..(87): n is a, c, g, or t
  misc_feature (131)..(131): n is a, c, g, or t
tcatttaccgttttaggattcgtctatgtttttcaagatcccatttcaattccttagtgantaaaaccaatgtgcattgtagagggnctttatttattttctgcctgagaaaggaagtgagctgtaaaggntgagatctttttttgaggtatgtagcctttggttagttttgtcaatcactgtttttgacttagcatggcaatttgatgaaatcccagctgtaagtctg

SEQ ID NO: 2052 - DNA, 229 bp, Mus musculus; identical to SEQ ID NO: 2051
  misc_feature (61)..(61): n is a, c, g, or t
  misc_feature (87)..(87): n is a, c, g, or t
  misc_feature (131)..(131): n is a, c, g, or t

SEQ ID NO: 2053 - DNA, 229 bp, Mus musculus; identical to SEQ ID NO: 2051
  misc_feature (61)..(61): n is a, c, g, or t
  misc_feature (87)..(87): n is a, c, g, or t
  misc_feature (131)..(131): n is a, c, g, or t

SEQ ID NO: 2054 - DNA, 89 bp, Mus musculus
ctgttcacatagagcgagataaagaccagcctgggagcttggagttcgagcctgggaacagatacaccttttgatgtatgaggaagatc

SEQ ID NO: 2055 - DNA, 89 bp, Mus musculus; identical to SEQ ID NO: 2054

SEQ ID NO: 2056 - DNA, 89 bp, Mus musculus; identical to SEQ ID NO: 2054

SEQ ID NO: 2057 - DNA, 215 bp, Mus musculus
  misc_feature (130)..(144): n is a, c, g, or t
taaccccacgaccaggttcttcaaggattaccggaaccgttttttgagaaatgttgttgatgacgaacatgagtggattgtcaggaccttccgcaagggttggttgccaatgcccaaacagaattcctannnnnnnnnnnnnnngcttcagcttttcaccagggatttccttttgcccattgctggcttgggaaactggctgtattcctagcttt

SEQ ID NO: 2058 - DNA, 215 bp, Mus musculus; identical to SEQ ID NO: 2057
  misc_feature (130)..(144): n is a, c, g, or t

SEQ ID NO: 2059 - DNA, 215 bp, Mus musculus; identical to SEQ ID NO: 2057
  misc_feature (130)..(144): n is a, c, g, or t

SEQ ID NO: 2060 - DNA, 52 bp, Mus musculus
ttttgggccagttcccttcatgcatttgcactaatttttggtgccaccttcc

SEQ ID NO: 2061 - DNA, 52 bp, Mus musculus; identical to SEQ ID NO: 2060

SEQ ID NO: 2062 - DNA, 52 bp, Mus musculus; identical to SEQ ID NO: 2060

SEQ ID NO: 2063 - DNA, 178 bp, Mus musculus
gaaccctgttgagagttgccgaggatcaggaagttccctgtcacacccaagaattgctgggtcttctaaccttgtccctttgtcttccaaccgtagcatcctgatccaaggcttcccaatatgccttttagggtgtttttttcacaggcatttttggttaccactgctttgtttctgg

SEQ ID NO: 2064 - DNA, 178 bp, Mus musculus; identical to SEQ ID NO: 2063

SEQ ID NO: 2065 - DNA, 178 bp, Mus musculus; identical to SEQ ID NO: 2063

SEQ ID NO: 2066 - DNA, 206 bp, Mus musculus
tgttcccctggatgtggggaccaaggtacattctaaccatgcccccccacaaggcttcctgaattcaaatgttaggtgttgagagtagctccattttcgggataaattttgatttccctggtttctggagggtgcagggtttgtggaacagtagtagggatggggagctgggctggtttcatcagaatgggcgtttttcccttcac

SEQ ID NO: 2067 - DNA, 206 bp, Mus musculus; identical to SEQ ID NO: 2066

SEQ ID NO: 2068 - DNA, 206 bp, Mus musculus; identical to SEQ ID NO: 2066

SEQ ID NO: 2069 - DNA, 514 bp, Mus musculus; identical to SEQ ID NO: 1835

SEQ ID NO: 2070 - DNA, 545 bp, Mus musculus; identical to SEQ ID NO: 1836

SEQ ID NO: 2071 - DNA, 525 bp, Mus musculus; identical to SEQ ID NO: 1837

SEQ ID NO: 2072 - DNA, 108 bp, Mus musculus
tatttgggcataaaaggtggtgcccttatttggaaagctgttataaatatatattatattaatatatggccaagggaaatgtttccgatgtctatttggataattacc

SEQ ID NO: 2073 - DNA, 514 bp, Mus musculus; identical to SEQ ID NO: 1835

SEQ ID NO: 2074 - DNA, 545 bp, Mus musculus; identical to SEQ ID NO: 1836

SEQ ID NO: 2075 - DNA, 525 bp, Mus musculus; identical to SEQ ID NO: 1837

SEQ ID NO: 2076 - DNA, 164 bp, Mus musculus
  misc_feature (43)..(43): n is a, c, g, or t
  misc_feature (45)..(47): n is a, c, g, or t
  misc_feature (49)..(50): n is a, c, g, or t
  misc_feature (52)..(53): n is a, c, g, or t
  misc_feature (56)..(56): n is a, c, g, or t
agtccaggagctttgcaaggccctgagccagccagatacagtncnnngnnannttnggttgggagactgtgatgtgacaaatagtggttgcagcagccttgccaatgtcctgctggccaaccgcagcctgagggaactggacctcagtaacaactgcatggggg

SEQ ID NO: 2077 - DNA, 164 bp, Mus musculus; identical to SEQ ID NO: 2076
  misc_feature (43)..(43): n is a, c, g, or t
  misc_feature (45)..(47): n is a, c, g, or t
  misc_feature (49)..(50): n is a, c, g, or t
  misc_feature (52)..(53): n is a, c, g, or t
  misc_feature (56)..(56): n is a, c, g, or t

SEQ ID NO: 2078 - DNA, 42 bp, Mus musculus
ttagctcactgtcagtcttgttccatcctgtcctgagggccc

SEQ ID NO: 2079 - DNA, 42 bp, Mus musculus; identical to SEQ ID NO: 2078

SEQ ID NO: 2080 - DNA, 87 bp, Mus musculus
tgcgcttcctgcatctgacccgcctttttcttttctcaaaattgaacttcgccctctacatttcccacattaaccaaggatggcccc

SEQ ID NO: 2081 - DNA, 87 bp, Mus musculus; identical to SEQ ID NO: 2080

SEQ ID NO: 2082 - DNA, 523 bp, Mus musculus
ccgggctctccatgtaatgacttcagaggctactgtgatgttttcatgcggtgcagattagtagatgctgatggccctctagctaggctgaaaaaagccatttttagtccacaactctatgaaaacattgctgagtggattgtggctcactggtgggcagtactgcttatgggaattgccctgatcatgttaatggctggatttatcaagatttgcagtgttcacactccaagtagtaatccaaagttgccgcctcctaaaccacttccaggcactttaaagaggaggagaccgccacagcccattcagcagcccccgcgtcagaggccccgagagagttatcaaatgggacacatgcgacgctaatgcagcttttgccttggttcttcctagtgcctacagtgggaaaacttcactccaaagagaaacctgttaagtcatcatctgcaaatgatacccttacagttaatagttgaagaaaaaatggcaagagatcatgtcctcagatcaggtggaattactc

SEQ ID NO: 2083 - DNA, 523 bp, Mus musculus; identical to SEQ ID NO: 2082

SEQ ID NO: 2084 - DNA, 389 bp, Mus musculus
  misc_feature (224)..(224): n is a, c, g, or t
  misc_feature (272)..(272): n is a, c, g, or t
  misc_feature (275)..(275): n is a, c, g, or t
  misc_feature (293)..(307): n is a, c, g, or t
  misc_feature (313)..(313): n is a, c, g, or t
  misc_feature (316)..(316): n is a, c, g, or t
  misc_feature (326)..(326): n is a, c, g, or t
  misc_feature (333)..(333): n is a, c, g, or t
  misc_feature (364)..(364): n is a, c, g, or t
ggctaaacacacagactccttgcattttaaaattctgtgcctttacttcctggagctataataacgtgcttgggtgtgtgacttgccgaggttggctttcccaatgctttatgtaaactctgctgttggcacttgcagctgtagaagctgtcggagggattacttacttacggttatagcatctggggtctcttgcagctgcaatgcctgggatcttttgcaantctgactttttcagtagcagcttggaatgttaaaatatggtgagcctnttntctgtgaaggaagggccnnnnnnnnnnnnnnnagggantcntgttaaagantgggaantcagtgcagtggttttcctgcctttcccttntcctttggtctatagtgatactgac

SEQ ID NO: 2085 - DNA, 389 bp, Mus musculus; identical to SEQ ID NO: 2084
  misc_feature (224)..(224): n is a, c, g, or t
  misc_feature (272)..(272): n is a, c, g, or t
  misc_feature (275)..(275): n is a, c, g, or t
  misc_feature (293)..(307): n is a, c, g, or t
  misc_feature (313)..(313): n is a, c, g, or t
  misc_feature (316)..(316): n is a, c, g, or t
  misc_feature (326)..(326): n is a, c, g, or t
  misc_feature (333)..(333): n is a, c, g, or t
  misc_feature (364)..(364): n is a, c, g, or t

SEQ ID NO: 2086 - DNA, 320 bp, Mus musculus
  misc_feature (253)..(267): n is a, c, g, or t
ggccctctatttcctgcctgtgctgggccaacatttagctactcagcatttcccagtggccgaagccgaggctgttgtgttgacgctgctcgcgatttatgtagccggcctggcccttccacacaacacccaccgagtggtcaactcacaggtcccagacaggggctggatggcactgaaactagtggccctcatctacctggcactgcagctgggttgcattgctctcctcaatttctccctgggcttcctnnnnnnnnnnnnnnnggtccctgctgctgcactcgccaagccccatgggccccggacactgtatgctg

SEQ ID NO: 2087 - DNA, 320 bp, Mus musculus; identical to SEQ ID NO: 2086
  misc_feature (253)..(267): n is a, c, g, or t

SEQ ID NO: 2088 - DNA, 288 bp, Mus musculus
acagcccaggaattttaggcagcagtgttgggtggagtctttgcggtcagtccttgccccaggttcatcagcgtgcacagccggtctctgggtccgtctcgtagcaaatgaagagtggcgaaaggttcaaggtggcttgtcctcctctaaggactgcgtcttggcttctgacggggagctttataacccagcacggttgttcattctgtcctcacaaagcactggattgctcccattttctttctttcatcccaggacacatgattgaacccgtttctacagttgagg

SEQ ID NO: 2089 - DNA, 288 bp, Mus musculus; identical to SEQ ID NO: 2088

SEQ ID NO: 2090 - DNA, 480 bp, Mus musculus
  misc_feature (37)..(37): n is a, c, g, or t
  misc_feature (48)..(48): n is a, c, g, or t
  misc_feature (54)..(55): n is a, c, g, or t
  misc_feature (85)..(85): n is a, c, g, or t
  misc_feature (87)..(89): n is a, c, g, or t
  misc_feature (96)..(97): n is a, c, g, or t
  misc_feature (106)..(106): n is a, c, g, or t
  misc_feature (120)..(120): n is a, c, g, or t
  misc_feature (199)..(199): n is a, c, g, or t
  misc_feature (203)..(204): n is a, c, g, or t
  misc_feature (207)..(207): n is a, c, g, or t
  misc_feature (209)..(209): n is a, c, g, or t
  misc_feature (215)..(216): n is a, c, g, or t
  misc_feature (222)..(222): n is a, c, g, or t
  misc_feature (228)..(228): n is a, c, g, or t
  misc_feature (245)..(264): n is a, c, g, or t
  misc_feature (309)..(323): n is a, c, g, or t
  misc_feature (327)..(327): n is a, c, g, or t
  misc_feature (337)..(337): n is a, c, g, or t
  misc_feature (341)..(341): n is a, c, g, or t
  misc_feature (356)..(356): n is a, c, g, or t
  misc_feature (371)..(371): n is a, c, g, or t
  misc_feature (373)..(373): n is a, c, g, or t
caaattgccaccaaagggtgcatggagaccatccctncaacattgccnactgtnntgacctctattcagctgctcatggcagacncnnncctgatnncccactaanggctgacatttctncagaatttaaatataacaagatagcttttctcaagaaagccaagcagtggacagaggctcatgcaagacagaaacaaanggcnnatnangagganntaggcnacctcntcagaagttggtgactnnnnnnnnnnnnnnnnnnnnagaaaaggaaggccaggccattaggaggaatggaaaaaaagtttnnnnnnnnnnnnnnnagantctatcctgntccntcttagttacggcantctgtgtcaaggtgntntcttttgcttgcttcttttaaatgttttcctttgtatttgatgacaaatgtttgtatccttacaaaagaccttgtatgtttacgaattctgccatgcagcgattctt

SEQ ID NO: 2091 - DNA, 480 bp, Mus musculus; identical to SEQ ID NO: 2090
  misc_feature (37)..(37): n is a, c, g, or t
  misc_feature (48)..(48): n is a, c, g, or t
  misc_feature (54)..(55): n is a, c, g, or t
  misc_feature (85)..(85): n is a, c, g, or t
  misc_feature (87)..(89): n is a, c, g, or t
  misc_feature (96)..(97): n is a, c, g, or t
  misc_feature (106)..(106): n is a, c, g, or t
  misc_feature (120)..(120): n is a, c, g, or t
  misc_feature (199)..(199): n is a, c, g, or t
  misc_feature (203)..(204): n is a, c, g, or t
  misc_feature (207)..(207): n is a, c, g, or t
  misc_feature (209)..(209): n is a, c, g, or t
  misc_feature (215)..(216): n is a, c, g, or t
  misc_feature (222)..(222): n is a, c, g, or t
  misc_feature (228)..(228): n is a, c, g, or t
  misc_feature (245)..(264): n is a, c, g, or t
  misc_feature (309)..(323): n is a, c, g, or t
  misc_feature (327)..(327): n is a, c, g, or t
  misc_feature (337)..(337): n is a, c, g, or t
  misc_feature (341)..(341): n is a, c, g, or t
  misc_feature (356)..(356): n is a, c, g, or t
  misc_feature (371)..(371): n is a, c, g, or t
  misc_feature (373)..(373): n is a, c, g, or t

SEQ ID NO: 2092 - DNA, 306 bp, Mus musculus
  misc_feature (42)..(43): n is a, c, g, or t
  misc_feature (45)..(46): n is a, c, g, or t
  misc_feature (48)..(48): n is a, c, g, or t
  misc_feature (150)..(150): n is a, c, g, or t
  misc_feature (179)..(179): n is a, c, g, or t
  misc_feature (262)..(262): n is a, c, g, or t
actccagcgagaatatgtacaccatcatgaatcccagcccgnngnncncaatggcctcaatgagcacgatggagccacaccacgtgaacggatccctgggctcgggcgatatggacgggctgccgaagaattcccccggcgccgtgggcngcctgagcaacgccccggggaccccgcgngacgatggcgagatggcggctgccgggaccttcctgcacccgttcccgagcgaaagctactcccccggcatgaccatgagcgngtgatagtcccggcctgagcccagggtcctgctggtgaggtctc

SEQ ID NO: 2093 - DNA, 306 bp, Mus musculus; identical to SEQ ID NO: 2092
  misc_feature (42)..(43): n is a, c, g, or t
  misc_feature (45)..(46): n is a, c, g, or t
  misc_feature (48)..(48): n is a, c, g, or t
  misc_feature (150)..(150): n is a, c, g, or t
  misc_feature (179)..(179): n is a, c, g, or t
  misc_feature (262)..(262): n is a, c, g, or t

SEQ ID NO: 2094 - DNA, 468 bp, Mus musculus
  misc_feature (127)..(157): n is a, c, g, or t
  misc_feature (209)..(225): n is a, c, g, or t
  misc_feature (287)..(306): n is a, c, g, or t
  misc_feature (405)..(405): n is a, c, g, or t
gcaactcttccttgtctactgaatgcccagctctccctgcctgctagcctgccagatcctagactgcaaactgggtgggcctatgtctttataaaacataaactgggtgggtctatgtctttatgannnnnnnnnnnnnnnnnnnnnnnnnnnnnnnccttggaatcactggtccactgcccgtacaacttgttcctgtcttttcccannnnnnnnnnnnnnnnntggaatcaagagttcccaacactgtgttcccacaaaaccctacagaacccctaaaccttccnnnnnnnnnnnnnnnnnnnntggcagctggtcagagctcaataattttatactgtaataagatctttgaatgtgtatattcttattttttacaatcatttcattttgtatttaacatcnatggactgagtcaagattcagtaaataattgtaatgttcatatgcgatatcttatagtggtac

SEQ ID NO: 2095 - DNA, 468 bp, Mus musculus; identical to SEQ ID NO: 2094
  misc_feature (127)..(157): n is a, c, g, or t
  misc_feature (209)..(225): n is a, c, g, or t
  misc_feature (287)..(306): n is a, c, g, or t
  misc_feature (405)..(405): n is a, c, g, or t

SEQ ID NO: 2096 - DNA, 251 bp, Mus musculus
  misc_feature (29)..(29): n is a, c, g, or t
  misc_feature (31)..(32): n is a, c, g, or t
  misc_feature (34)..(34): n is a, c, g, or t
acgtggacaccaaggccggccacggggcngnnanacccaccgccaaagtgatagaagaagtctcggatatgtttgcgttcatagcacggtgcctgaacatcgagtggatccagtaaatgggatttccagttcctcccaccaaacacagaaaacctcaagggctttcacaccatcctgaccaagaaaccactgggcagagtgctgccctacgtgagcactgtgcctccgctcacagacagcaagccgctgag

SEQ ID NO: 2097 - DNA, 251 bp, Mus musculus; identical to SEQ ID NO: 2096
  misc_feature (29)..(29): n is a, c, g, or t
  misc_feature (31)..(32): n is a, c, g, or t
  misc_feature (34)..(34): n is a, c, g, or t

SEQ ID NO: 2098 - DNA, 536 bp, Mus musculus
  misc_feature (26)..(48): n is a, c, g, or t
  misc_feature (92)..(128): n is a, c, g, or t
  misc_feature (166)..(166): n is a, c, g, or t
  misc_feature (251)..(251): n is a, c, g, or t
  misc_feature (253)..(253): n is a, c, g, or t
  misc_feature (256)..(256): n is a, c, g, or t
  misc_feature (265)..(265): n is a, c, g, or t
  misc_feature (270)..(270): n is a, c, g, or t
  misc_feature (272)..(273): n is a, c, g, or t
  misc_feature (275)..(275): n is a, c, g, or t
  misc_feature (277)..(277): n is a, c, g, or t
  misc_feature (279)..(279): n is a, c, g, or t
  misc_feature (285)..(285): n is a, c, g, or t
  misc_feature (289)..(289): n is a, c, g, or t
  misc_feature (298)..(298): n is a, c, g, or t
  misc_feature (301)..(301): n is a, c, g, or t
  misc_feature (303)..(303): n is a, c, g, or t
  misc_feature (305)..(305): n is a, c, g, or t
  misc_feature (328)..(328): n is a, c, g, or t
  misc_feature (331)..(331): n is a, c, g, or t
  misc_feature (340)..(340): n is a, c, g, or t
  misc_feature (344)..(344): n is a, c, g, or t
  misc_feature (346)..(346): n is a, c, g, or t
  misc_feature (376)..(376): n is a, c, g, or t
  misc_feature (378)..(378): n is a, c, g, or t
  misc_feature (385)..(385): n is a, c, g, or t
  misc_feature (394)..(394): n is a, c, g, or t
  misc_feature (407)..(407): n is a, c, g, or t
  misc_feature (409)..(409): n is a, c, g, or t
  misc_feature (421)..(421): n is a, c, g, or t
  misc_feature (423)..(423): n is a, c, g, or t
  misc_feature (433)..(447): n is a, c, g, or t
  misc_feature (475)..(475): n is a, c, g, or t
  misc_feature (499)..(500): n is a, c, g, or t
  misc_feature (511)..(511): n is a, c, g, or t
agagcacaacatcaatgtcctcgagnnnnnnnnnnnnnnnnnnnnnnntgccaagatcatcaagcatcccaacttcaatagcaggaccctgnnnnnnnnnnnnnnnnnnnnnnnnnnnnnnnnnnnnntgaccctcaatgccagagtggccactgtggctctgccnagctcctgtgcacctgcaggcactcagtgtctcatctctggctggggcaacaccttgagctttggtgtgaacaacccagacctgntncantgcctggangcccnanngntncntcaggntgantgtgaggcntcntntnctggaaagatcaccaataacatnatntgtgttggnttcntngagggaggcaaagattcctgccagggtgantntggtggncctgtggtntgcaatggacagntncagggcattgtntnctggggctannnnnnnnnnnnnnnggacaaccctggtgtgtacaccaaggtntgcaactatgtggactggattcannacaccattgcngcaaactaagcatccctttgaagtc

SEQ ID NO: 2099 - DNA, 536 bp, Mus musculus; identical to SEQ ID NO: 2098
  misc_feature (26)..(48): n is a, c, g, or t
  misc_feature (92)..(128): n is a, c, g, or t
  misc_feature (166)..(166): n is a, c, g, or t
  misc_feature (251)..(251): n is a, c, g, or t
  misc_feature (253)..(253): n is a, c, g, or t
  misc_feature (256)..(256): n is a, c, g, or t
  misc_feature (265)..(265): n is a, c, g, or t
  misc_feature (270)..(270): n is a, c, g, or t
  misc_feature (272)..(273): n is a, c, g, or t
  misc_feature (275)..(275): n is a, c, g, or t
  misc_feature (277)..(277): n is a, c, g, or t
  misc_feature (279)..(279): n is a, c, g, or t
  misc_feature (285)..(285): n is a, c, g, or t
  misc_feature (289)..(289): n is a, c, g, or t
  misc_feature (298)..(298): n is a, c, g, or t
  misc_feature (301)..(301): n is a, c, g, or t
  misc_feature (303)..(303): n is a, c, g, or t
  misc_feature (305)..(305): n is a, c, g, or t
  misc_feature (328)..(328): n is a, c, g, or t
  misc_feature (331)..(331): n is a, c, g, or t
  misc_feature (340)..(340): n is a, c, g, or t
  misc_feature (344)..(344): n is a, c, g, or t
  misc_feature (346)..(346): n is a, c, g, or t
  misc_feature (376)..(376): n is a, c, g, or t
  misc_feature (378)..(378): n is a, c, g, or t
  misc_feature (385)..(385): n is a, c, g, or t
  misc_feature (394)..(394): n is a, c, g, or t
  misc_feature (407)..(407): n is a, c, g, or t
  misc_feature (409)..(409): n is a, c, g, or t
  misc_feature (421)..(421): n is a, c, g, or t
  misc_feature (423)..(423): n is a, c, g, or t
  misc_feature (433)..(447): n is a, c, g, or t
  misc_feature (475)..(475): n is a, c, g, or t
  misc_feature (499)..(500): n is a, c, g, or t
  misc_feature (511)..(511): n is a, c, g, or t

SEQ ID NO: 2100 - DNA, 557 bp, Mus musculus
  misc_feature (458)..(506): n is a, c, g, or t
accttccaggagtatgcagggcgctgtggggataaatacaagatctgccagtcggagctcaaggagttgttgcagaaggagctgcccacctggacgccgagtgagttccgggagtgtgactacaataaattcatgagtgttctggataccaacaaagactgcgaagtggactttggggagtacgtgcgctcacttgccagcctctgtctctactgccacgagtacttcaaagagtgcccccctgagcctccttgcccccagtagcctctgatccaaaggtgtacgctatcccagaagggcagggtctgctccagtcctccatctttgtccttgaggtggtcctgggtgtgtagccacacccttcccactctctctgtggtacccctttcaatctagacttgccaagttcttgatgtgctaaccccacccagctacccatgagctttcgaggctttccnnnnnnnnnnnnnnnnnnnnnnnnnnnnnnnnnnnnnnnnnnnnnnnnnttctcttcttggaagggaagaacatctctgctcagccatgtgcacacaact

SEQ ID NO: 2101 - DNA, 557 bp, Mus musculus; identical to SEQ ID NO: 2100
  misc_feature (458)..(506): n is a, c, g, or t

SEQ ID NO: 2102 - DNA, 97 bp, Mus musculus
gctgcccacctggacgccgagtgagttccgggagtgtgactacaataaattcatgagtgttctggataccaacaaagactgcgaagtggactttggg

SEQ ID NO: 2103 - DNA, 97 bp, Mus musculus; identical to SEQ ID NO: 2102

SEQ ID NO: 2104 - DNA, 180 bp, Mus musculus
  misc_feature (32)..(46): n is a, c, g, or t
ttgacaaggcttatgtggtccttggccagttnnnnnnnnnnnnnnnagatgaagacctcttccgagaatggctgaaggatacatgtggtgccaatgccaagcagtcccgggactgctttgggtgccttcgagaatggtgtgatgccttcttgtagtgttctctggggatccctcataccc

SEQ ID NO: 2105 - DNA, 180 bp, Mus musculus; identical to SEQ ID NO: 2104
  misc_feature (32)..(46): n is a, c, g, or t

SEQ ID NO: 2106 - DNA, 517 bp, Mus musculus
  misc_feature (95)..(124): n is a, c, g, or t
ttccctcatcaatgaccagtgggtggtgtctgcagctcactgctacaagtcccgcatccaagtgagactgggagagcacaacatcaacgtcctgnnnnnnnnnnnnnnnnnnnnnnnnnnnnnnaacatcatcaagcatcctaaattcaaaaagaagactctggacaatgacatcatgctgatcaagctgtcttctcctgtgaccctcaatgccagagtggccactgtggctctgcccagctcctgtgcagctgctggcactcagtgcctcatctctggctggggcaacaccttgagctctggcgtgaacaacccagacctgctccagtgcctggatgctccactgctgcctcaggctgactgtgaggcctcctatcctggaaagatcaccaagaacatgatctgtgttggcttcctggagggaggcaaagattcctgccagggtgactctggtggccctgtggtctgcaatggacagctccagggcattgtttcttggggctatggctgtgcccag

SEQ ID NO: 2107 - DNA, 517 bp, Mus musculus; identical to SEQ ID NO: 2106
  misc_feature (95)..(124): n is a, c, g, or t

SEQ ID NO: 2108 - DNA, 210 bp, Mus musculus
  misc_feature (54)..(91): n is a, c, g, or t
ggtgcagctgttacttgaatcagtcatgaccaagagaggccggccattcctcannnnnnnnnnnnnnnnnnnnnnnnnnnnnnnnnnnnnngacaatttaagccttgctgctcttgacattctagaatggatggagtgcatctggaaaagactggacacagatgatacaggggaatgatgaccgtataccctggagaagcacagcacagg

SEQ ID NO: 2109 - DNA, 210 bp, Mus musculus; identical to SEQ ID NO: 2108
  misc_feature (54)..(91): n is a, c, g, or t

SEQ ID NO: 2110 - DNA, 190 bp, Mus musculus
  misc_feature (89)..(91): n is a, c, g, or t
  misc_feature (93)..(93): n is a, c, g, or t
  misc_feature (98)..(98): n is a, c, g, or t
  misc_feature (100)..(100): n is a, c, g, or t
  misc_feature (125)..(125): n is a, c, g, or t
  misc_feature (140)..(140): n is a, c, g, or t
  misc_feature (149)..(149): n is a, c, g, or t
tgagccactgtcctgaccctgctgactgacaggcaagggacagccacccaagcccaataagaggagtaaaaaaagtagcaaaattgcannnancactntntcccaggctttgaaaggtagcagtntaggctataaaagtntagaagctntgcatagggagtgttaagcctgcagcaaaacaacttgtaaa

SEQ ID NO: 2111 - DNA, 190 bp, Mus musculus; identical to SEQ ID NO: 2110
  misc_feature (89)..(91): n is a, c, g, or t
  misc_feature (93)..(93): n is a, c, g, or t
  misc_feature (98)..(98): n is a, c, g, or t
  misc_feature (100)..(100): n is a, c, g, or t
  misc_feature (125)..(125): n is a, c, g, or t
  misc_feature (140)..(140): n is a, c, g, or t
  misc_feature (149)..(149): n is a, c, g, or t

SEQ ID NO: 2112 - DNA, 306 bp, Mus musculus
  misc_feature (26)..(42): n is a, c, g, or t
ggctttgtggtaagctgctagcagcnnnnnnnnnnnnnnnnncagcccccctttggatgcagagcagcctctacaatcattctgaccttaaaggtagagtatggaccttttgtggtatgtgtgtgtatgcttttttttatgtagtgattttttttttcttgagacagggcccagagtggccttgacctctgatcctcagcctcccagatgctggggttacaggtttgcgctgacatgcctggctagttggaactctttgttcttaaaagcacagtagagagatcattgtgacctattaagtctgtg

SEQ ID NO: 2113 - DNA, 306 bp, Mus musculus; identical to SEQ ID NO: 2112
  misc_feature (26)..(42): n is a, c, g, or t

SEQ ID NO: 2114 - DNA, 378 bp, Mus musculus
  misc_feature (158)..(158): n is a, c, g, or t
  misc_feature (240)..(240): n is a, c, g, or t
  misc_feature (329)..(329): n is a, c, g, or t
  misc_feature (331)..(331): n is a, c, g, or t
  misc_feature (352)..(352): n is a, c, g, or t
cactgtcaagaagcagatggaagaactaaccgtcagtgaattcttgaaactggacagacagagagccaagaacaaaattgcaaaggagaccaacaacaagcaaaaagagtttgaagagactgcaaagactacccgtcagtcaattgagcagctggctncctaatgctgagcctttgctgagataacttggacctgagtgacatgccacatctaagccacgcatcccagcttttccagccngggcctcctagcaggatcttagagaaggagacagtggtattttgaaactggatatcaaatatttttggttttgctttaaagtggctacntntctttggttttgtggctttgntctattgtgacgtggacttaagcaat

SEQ ID NO: 2115 - DNA, 378 bp, Mus musculus; identical to SEQ ID NO: 2114
  misc_feature (158)..(158): n is a, c, g, or t
  misc_feature (240)..(240): n is a, c, g, or t
  misc_feature (329)..(329): n is a, c, g, or t
  misc_feature (331)..(331): n is a, c, g, or t
  misc_feature (352)..(352): n is a, c, g, or t

SEQ ID NO: 2116 - DNA, 210 bp, Mus musculus
  misc_feature (45)..(45): n is a, c, g, or t
  misc_feature (54)..(54): n is a, c, g, or t
  misc_feature (67)..(100): n is a, c, g, or t
  misc_feature (165)..(165): n is a, c, g, or t
  misc_feature (168)..(182): n is a, c, g, or t
attgcttcccagacggtgaagaaagtaatagagatcaacccgtancttctgggnaccatggctgggnnnnnnnnnnnnnnnnnnnnnnnnnnnnnnnnnntggctcggcagtgtcgaatctatgagcttcgcaataaggaacgcatctcggtcgcagcagcctcnaannnnnnnnnnnnnnnggtgtatcagtacaaaggcatggggctg

SEQ ID NO: 2117 - DNA, 210 bp, Mus musculus; identical to SEQ ID NO: 2116
  misc_feature (45)..(45): n is a, c, g, or t
  misc_feature (54)..(54): n is a, c, g, or t
  misc_feature (67)..(100): n is a, c, g, or t
  misc_feature (165)..(165): n is a, c, g, or t
  misc_feature (168)..(182): n is a, c, g, or t

SEQ ID NO: 2118 - DNA, 340 bp, Mus musculus
  misc_feature (234)..(255): n is a, c, g, or t
ggtaagcaccgcaagcacccaggcggccgcgggaatgctggaggcatgcaccaccacaggatcaactttgacaaatatcacccaggttactttgggaaagttggtatgcggcattaccacttgaagaggaaccagagcttctgcccaacagtcaacctggataaactgtggacattggtcagcgagcagacacgggtcaatgcggcaaaaaacaagactggagttgctcccatnnnnnnnnnnnnnnnnnnnnnntactacaaagttctgggcaagggaaagctccctaagcaacctgtcatcgtgaaggccaaattcttcagcagaagagctgaggaga

SEQ ID NO: 2119 - DNA, 340 bp, Mus musculus; identical to SEQ ID NO: 2118
  misc_feature (234)..(255): n is a, c, g, or t

SEQ ID NO: 2120 - DNA, 385 bp, Mus musculus
ttaccatgaagctcactggtgctctggtgatcctcggggctaccctgctcctcctaacttcagggggagattgtggcatttgtccagctataaaagaggatgttcatctatttcttttcgggaccccagaagagtatgttaattatgtggagaaatacaaagatgaccctgaaacactggaaaatactgaaaaactcaagatatgtgtcgataggacgttgacgaaggaaaacaaggaacatgcggctgcttttatcgaaaaaatagaatccagtccgttatgttgatggctacatctttgctctcaaggaagcctcttgcctgattacctacatagatgcaacaagccctacccattccctcaggtgtctaagaacaggaatcc

SEQ ID NO: 2121 - DNA, 385 bp, Mus musculus; identical to SEQ ID NO: 2120

SEQ ID NO: 2122 - DNA, 53 bp, Mus musculus
tcagggaacagttggggttaccacatttccaattatggcagatttgtgattct

SEQ ID NO: 2123 - DNA, 53 bp, Mus musculus; identical to SEQ ID NO: 2122

SEQ ID NO: 2124 - DNA, 277 bp, Mus musculus
  misc_feature (90)..(104): n is a, c, g, or t
tgcatttctcttctcgcctggagcccatcactgttaccatccttaagttgcactgcagaaagtcactctgcaaaacagatgtaaaacgtnnnnnnnnnnnnnnnagtttggggcaaatgcggctacatctcccaatgcaggaagatgagcagggagttcaaaccctccagtggccgacgaaacccagttatggtttatgtttagccattgtttaggaatggaattttgttatgaattatccctttaactgaaaccctcagttttactgtttacatgg

SEQ ID NO: 2125 - DNA, 277 bp, Mus musculus; identical to SEQ ID NO: 2124
  misc_feature (90)..(104): n is a, c, g, or t

SEQ ID NO: 2126 - DNA, 526 bp, Mus musculus
  misc_feature (89)..(89): n is a, c, g, or t
  misc_feature (227)..(227): n is a, c, g, or t
  misc_feature (473)..(474): n is a, c, g, or t
  misc_feature (479)..(479): n is a, c, g, or t
  misc_feature (484)..(484): n is a, c, g, or t
  misc_feature (487)..(489): n is a, c, g, or t
tgtgtgccttcagtgatgtgcaaattgcctcctgctttagggaattgttgtaaattgtatgttagtgctgtgctcactcagtaacagcnaggttggctcaaatgctggaaacgttgggtttcagaaagagtttgactatgtattgatgtaaaggctgacaacagcaaagcctgttttattcttaggaaaaactgatacaatgtgcaataagtaaactttgcaagtgnacattagctaactaaaaacgtttgcttatgtaatttcacattcttatatactaaatatttatatttattagaggactgttttgtattgtgctctgggggttgtgttgtttgtgtgctgttttgaggtgattttcttgtattaatatacaactgggtaataaggctgcttggaaacctttttttggttccctgattttttaacactgggaagttggattcattaaaagatagtctgaataacttgcnnaaaanaaaanaannnccgacgggagctttggtccattgatgagggtaattcc

SEQ ID NO: 2127 - DNA, 526 bp, Mus musculus; identical to SEQ ID NO: 2126
  misc_feature (89)..(89): n is a, c, g, or t
  misc_feature (227)..(227): n is a, c, g, or t
  misc_feature (473)..(474): n is a, c, g, or t
  misc_feature (479)..(479): n is a, c, g, or t
  misc_feature (484)..(484): n is a, c, g, or t
  misc_feature (487)..(489): n is a, c, g, or t

SEQ ID NO: 2128 - DNA, 385 bp, Mus musculus
  misc_feature (47)..(64): n is a, c, g, or t
  misc_feature (245)..(281): n is a, c, g, or t
  misc_feature (306)..(306): n is a, c, g, or t
  misc_feature (311)..(311): n is a, c, g, or t
  misc_feature (328)..(328): n is a, c, g, or t
tctgtgggactgcactggagctctgtctgatgagttgtcctttaagnnnnnnnnnnnnnnnnnnattcttagcaaggaatacaatagatatggctggtgggtaggagagatgaagggagccattggcttggtgcctaaagcctacctaatggagatgtatgatatttgagagtctggagaagtcttgtgtctgtctgcaagtgccttggaacatggaatgcctgagtgcctgctcggagccaccnnnnnnnnnnnnnnnnnnnnnnnnnnnnnnnnnnnnngatgtagtcacgcactaaagcactntgatntcagattgagcaggcantgatgggttacattagatacaagcagtagagataagacctgttgctgttttgcaaat

SEQ ID NO: 2129 - DNA, 385 bp, Mus musculus; identical to SEQ ID NO: 2128
  misc_feature (47)..(64): n is a, c, g, or t
  misc_feature (245)..(281): n is a, c, g, or t
  misc_feature (306)..(306): n is a, c, g, or t
  misc_feature (311)..(311): n is a, c, g, or t
  misc_feature (328)..(328): n is a, c, g, or t

SEQ ID NO: 2130 - DNA, 122 bp, Mus musculus
  misc_feature (80)..(80): n is a, c, g, or t
  misc_feature (97)..(97): n is a, c, g, or t
atctcactttttctggggtctgtggtccaccctgcaggcttcgatgtccactatagagttcggctacttggagtatgccnaatctcggttccagttntacttccagcagaagggccagctga

SEQ ID NO: 2131 - DNA, 122 bp, Mus musculus; identical to SEQ ID NO: 2130
  misc_feature (80)..(80): n is a, c, g, or t
  misc_feature (97)..(97): n is a, c, g, or t

SEQ ID NO: 2132 - DNA, 414 bp, Mus musculus
  misc_feature (212)..(228): n is a, c, g, or t
  misc_feature (274)..(290): n is a, c, g, or t
  misc_feature (347)..(347): n is a, c, g, or t
  misc_feature (356)..(356): n is a, c, g, or t
ctagagccacctgaagctccagagctcccctgccagcccagcagaggaagcagctcagcaaaggcctctgagctatgctcactatacagaactgatatagtgaaaaaccagctaactaaatataaaattcccagatgtcatagatgccttaaagacttttctcgggaggatcattgcctcttgtgtggaataaataatgtattaactcttannnnnnnnnnnnnnnnntttccacagtgagggagtctggggactgctggacttactgacttgnnnnnnnnnnnnnnnnnggaactgggcgttccatgatatcttatggtaccaaggacaaggtggcagcagctggnccataactncaggcacgtgtttgtatagaccactttggctctcaaactgctctggtgctgctcagtg

SEQ ID NO: 2133 - DNA, 414 bp, Mus musculus; identical to SEQ ID NO: 2132
  misc_feature (212)..(228): n is a, c, g, or t
  misc_feature (274)..(290): n is a, c, g, or t
  misc_feature (347)..(347): n is a, c, g, or t
  misc_feature (356)..(356): n is a, c, g, or t

SEQ ID NO: 2134 - DNA, 141 bp, Mus musculus
tttgtgcccccgtgtgtttggcagcagagtacagtttccagggacttgggatggggaaggggacaggtgtaacgggttgagctgtcccgcccgtgttttgacccccccggggtgggcacatgtttgtcagttgtgtccccc

SEQ ID NO: 2135 - DNA, 141 bp, Mus musculus; identical to SEQ ID NO: 2134

SEQ ID NO: 2136 - DNA, 392 bp, Mus musculus
  misc_feature (61)..(76): n is a, c, g, or t
  misc_feature (305)..(337): n is a, c, g, or t
gccctaatgcatgtgtactgtgccagccctgacttggccaccaggcgcccgctgggccagnnnnnnnnnnnnnnnntgggcagctgtggctggaagctgccaccatcctgggcctatccaggggtgtggtgggatgtgtcactagtggctgtggctgtgctgggcctgattctgctggctggtctattgaacacatttacagagtccaggaactgagcctagcccataaaaccagggagagcccaggtccccagaagcatcagccccagtcagcccatgccatcaaaagcccacagggggcaggnnnnnnnnnnnnnnnnnnnnnnnnnnnnnnnnntccagtctaaagacctgggttttatccccaggagagacctaaatctcacctccac

SEQ ID NO: 2137 - DNA, 392 bp, Mus musculus; identical to SEQ ID NO: 2136
  misc_feature (61)..(76): n is a, c, g, or t
  misc_feature (305)..(337): n is a, c, g, or t

SEQ ID NO: 2138 - DNA, 534 bp, Mus musculus
  misc_feature (26)..(26): n is a, c, g, or t
  misc_feature (115)..(131): n is a, c, g, or t
  misc_feature (279)..(300): n is a, c, g, or t
  misc_feature (373)..(373): n is a, c, g, or t
  misc_feature (444)..(444): n is a, c, g, or t
  misc_feature (451)..(465): n is a, c, g, or t
  misc_feature (501)..(501): n is a, c, g, or t
  misc_feature (503)..(503): n is a, c, g, or t
gtgtctaagaagctggcgctctcgcnagaacacactaaactgagctaccggcgtcgggacagccacgagcttctgctcctgtccgaagaaagcatgaaggatgcctggggccaannnnnnnnnnnnnnnnngactctgtggtgtgagcatacggtgggtgaccaaggtcttattgatgaacccatacaaagggaaaactcagacgccagtaagcagactacggagcctcagcctaaggaggggacccaggtggtagcaatcttcagttatgaggctgcnnnnnnnnnnnnnnnnnnnnnngtggaaggagatgtaatcctggtactgtcacatgtgaatgaagaatggctggaaggggagtgtaaagggaaanttggcattttcccgaaggcttttgttgaaggatgtgcagccaagaatttggaaggcattcccagagaagtntaggatnnnnnnnnnnnnnnnaaagtgttgtttttccccttgcaagacttacccatntntgctgtgcgctatacagacacaccagtttgg

SEQ ID NO: 2139 - DNA, 534 bp, Mus musculus; identical to SEQ ID NO: 2138
  misc_feature (26)..(26): n is a, c, g, or t
  misc_feature (115)..(131): n is a, c, g, or t
  misc_feature (279)..(300): n is a, c, g, or t
  misc_feature (373)..(373): n is a, c, g, or t
  misc_feature (444)..(444): n is a, c, g, or t
  misc_feature (451)..(465): n is a, c, g, or t
  misc_feature (501)..(501): n is a, c, g, or t
  misc_feature (503)..(503): n is a, c, g, or t

SEQ ID NO: 2140 - DNA, 542 bp, Mus musculus
  misc_feature (33)..(33): n is a, c, g, or t
  misc_feature (40)..(40): n is a, c, g, or t
  misc_feature (50)..(50): n is a, c, g, or t
  misc_feature (55)..(55): n is a, c, g, or t
  misc_feature (157)..(157): n is a, c, g, or t
  misc_feature (160)..(160): n is a, c, g, or t
  misc_feature (180)..(180): n is a, c, g, or t
  misc_feature (204)..(300): n is a, c, g, or t
  misc_feature (303)..(303): n is a, c, g, or t
  misc_feature (305)..(305): n is a, c, g, or t
  misc_feature (310)..(310): n is a, c, g, or t
  misc_feature (322)..(322): n is a, c, g, or t
  misc_feature (325)..(325): n is a, c, g, or t
  misc_feature (345)..(345): n is a, c, g, or t
  misc_feature (360)..(360): n is a, c, g, or t
  misc_feature (480)..(480): n is a, c, g, or t
  misc_feature (493)..(493): n is a, c, g, or t
actgtgatcaggatgactgcagtgggcctctgncaggtgncagcccgagnggganccatgctagggcctttggtacggctgctgggtgtctatggctcctggatgcccctgctggtgtatggagtggtgccagtgttaagtggcctagctgcactgntgntgcctgagaccaagaacttnccactgcctgacaccatccaagannnnnnnnnnnnnnnnnnnnnnnnnnnnnnnnnnnnnnnnnnnnnnnnnnnnnnnnnnnnnnnnnnnnnnnnnnnnnnnnnnnnnnnnnnnnnnnnnccncnataanaggaggaggaanaanaggaggaggaggaagagganaagagagagagaganagaaggaggaggaggaggaggaggaggaggaggaggagtaaagggcagggctggcgacggcgggtaaagacacctgcctccgggcctaaatttctgaaactcatgtgacaacagacttcncaaagttgtcctntgagctccgcatggacacatacccgcccccggtgatacacacaaataaa

SEQ ID NO: 2141 - DNA, 542 bp, Mus musculus; identical to SEQ ID NO: 2140
  misc_feature (33)..(33): n is a, c, g, or t
  misc_feature (40)..(40): n is a, c, g, or t
  misc_feature (50)..(50): n is a, c, g, or t
  misc_feature (55)..(55): n is a, c, g, or t
  misc_feature (157)..(157): n is a, c, g, or t
  misc_feature (160)..(160): n is a, c, g, or t
  misc_feature (180)..(180): n is a, c, g, or t
  misc_feature (204)..(300): n is a, c, g, or t
  misc_feature (303)..(303): n is a, c, g, or t
  misc_feature (305)..(305): n is a, c, g, or t
  misc_feature (310)..(310): n is a, c, g, or t
  misc_feature (322)..(322): n is a, c, g, or t
  misc_feature (325)..(325): n is a, c, g, or t
  misc_feature (345)..(345): n is a, c, g, or t
  misc_feature (360)..(360): n is a, c, g, or t
  misc_feature (480)..(480): n is a, c, g, or t
  misc_feature (493)..(493): n is a, c, g, or t

SEQ ID NO: 2142 - DNA, 338 bp, Mus musculus
  misc_feature (71)..(71): n is a, c, g, or t
taccgaagacaagctggaaaaatatggtgcagaagtgattccagtattacagaagtactcagaatggacantgccagctgaggatggttccccaggcgccagaggcgccccagaggacactgaggaggaggaggaggaagcgcctgtatcttctcactactttgcaaatcaaactagaaatgaaagaaagagaaagaaaatgtcagccacccataagcccaagaggagaagaactagttacggtggcttcagagcaaaggggggctctactacatgcagaaaaacgacttctaaaagtaaattctatggtgtaactggatcccgctcggcctcatgtg

SEQ ID NO: 2143 - DNA, 338 bp, Mus musculus; identical to SEQ ID NO: 2142
  misc_feature (71)..(71): n is a, c, g, or t

SEQ ID NO: 2144 - DNA, 547 bp, Mus musculus
  misc_feature (30)..(49): n is a, c, g, or t
  misc_feature (265)..(280): n is a, c, g, or t
aatcggccgaactacatgcaggaagaccannnnnnnnnnnnnnnnnnnntgtgacttccaaaccaaccctgccttgaagcggactctatattgctactctgaagtctgggtcatcccctggctccacagttttgaggtgcctgttctcctctgccagtgacttctgtctctttagcaagactgcagctgtgatacatatccactcgtgttttccccactccttactttccaccccatcctggccatctcagatcctcagggcctnnnnnnnnnnnnnnnnattaacatgccagtgggtcatcagggggctggactgggagaatatagtgccctcctctccagattaactgtattcacactttcttctaaaatgaattctctggtgctacacacctagattcaggatgtgggcacgcagagagtcctttgatgacattactggagcacgtgcagagcaaagcagatacagtcaacaaggtggtagtgtgggaagcttcttgatgcccgactgcatgagcagattctgcagccgtctggtctgctacca

SEQ ID NO: 2145 - DNA, 547 bp, Mus musculus; identical to SEQ ID NO: 2144
  misc_feature (30)..(49): n is a, c, g, or t
  misc_feature (265)..(280): n is a, c, g, or t

SEQ ID NO: 2146 - DNA, 440 bp, Mus musculus
  misc_feature (26)..(40): n is a, c, g, or t
  misc_feature (271)..(271): n is a, c, g, or t
tttcatgacccatcttcagagactgnnnnnnnnnnnnnnntattaaagcattcattttctttgttacatttctctatctgatgtgtcttactgctgaaacacatgaaaagtgacgtgtttttaatgcgttcagaggtttggagtttgttttttctttcttttgggtattactatctgttctgtttttctcttttcataaaggtttggttgatttccaaccaaataagatagtggataccatgaactacatgtgcctagctaattggcaaanttattgaccaatatactaagtgcagcgcctcatttgagtaccctttttaggaaggtatgatgaaaatgggcgagcgtgtcagcatctattaataatcgtttttggttttggttcatgaagaatgcttagtttgttaacctgtgatgttgcctagagctgtatttatctg

SEQ ID NO: 2147 - DNA, 440 bp, Mus musculus; identical to SEQ ID NO: 2146
  misc_feature (26)..(40): n is a, c, g, or t
  misc_feature (271)..(271): n is a, c, g, or t

SEQ ID NO: 2148 - DNA, 273 bp, Mus musculus
  misc_feature (103)..(104): n is a, c, g, or t
  misc_feature (106)..(106): n is a, c, g, or t
  misc_feature (113)..(113): n is a, c, g, or t
  misc_feature (119)..(119): n is a, c, g, or t
  misc_feature (177)..(177): n is a, c, g, or t
  misc_feature (213)..(229): n is a, c, g, or t
acgttgccacagaagccccgctatggaaaaaaataaataaaacctacaaaccaggcctgagcttcacagtcctttgagtggttcttgggtcccacagccctgnnanggggctncgggancaagggggaatcttatgctcttggtttctgggagacagggggcaggcaggcagtggcnctgtgatcccaggcttctgttctgctgtggctggcnnnnnnnnnnnnnnnnnagttgtacataaaaagtgtcccaagcttcgattctgtgtgtggt

SEQ ID NO: 2149 - DNA, 273 bp, Mus musculus; identical to SEQ ID NO: 2148
  misc_feature (103)..(104): n is a, c, g, or t
  misc_feature (106)..(106): n is a, c, g, or t
  misc_feature (113)..(113): n is a, c, g, or t
  misc_feature (119)..(119): n is a, c, g, or t
  misc_feature (177)..(177): n is a, c, g, or t
  misc_feature (213)..(229): n is a, c, g, or t

SEQ ID NO: 2150 - DNA, 246 bp, Mus musculus
  misc_feature (97)..(99): n is a, c, g, or t
  misc_feature (133)..(133): n is a, c, g, or t
  misc_feature (186)..(186): n is a, c, g, or t
ggcttcacagatttcctgctgcccatgttggagcttatgcctgagaagagagccactgctgctgagtgtctccggcatccttggctaaactcctaannngccagtcctgccactgcagcagagctcatcatanggaccttccctccagcccacccctcaaacttccctctcctttttcagggcaangctctttctttcaagggtttctattttttttttaaaccaacatgttcatttgggtttgct

SEQ ID NO: 2151 - DNA, 246 bp, Mus musculus; identical to SEQ ID NO: 2150
  misc_feature (97)..(99): n is a, c, g, or t
  misc_feature (133)..(133): n is a, c, g, or t
  misc_feature (186)..(186): n is a, c, g, or t

SEQ ID NO: 2152 - DNA, 536 bp, Mus musculus
  misc_feature (29)..(57): n is a, c, g, or t
  misc_feature (272)..(272): n is a, c, g, or t
  misc_feature (332)..(332): n is a, c, g, or t
  misc_feature (338)..(338): n is a, c, g, or t
  misc_feature (406)..(406): n is a, c, g, or t
  misc_feature (510)..(510): n is a, c, g, or t
attaccacagaagaggaaaactcctgcannnnnnnnnnnnnnnnnnnnnnnnnnnnnctgaagtgagccatacacaaccacccaacgaatgtttttgagtttagtgtgcttgcctaaaatgtataaagtgcactagaaaattttcagctacaacctgaacattgctgtgatgcatttgtgtagcagtttaaaggcatacatctgaaggactatgcttcagattctaatgatcctgtaaactggatacctttaacctgaatttgaatcactgnttattgactgttcctaatgaggctgaaatagttttaacaaggagatttgtttcaaaaatntcatanttcataaaagcaaaagttatacattagggttatttcatgttttcctgatttttatatatgtattcttnccatttaacctctttaacagcctgagcagagagtttaacaatgaagctggggctctaaacttaaaatatgtatatatgtaaatgtgtgtatgtataaacttctntcatttgccaaacttgggcaccaaaa

SEQ ID NO: 2153 - DNA, 536 bp, Mus musculus; identical to SEQ ID NO: 2152
  misc_feature (29)..(57): n is a, c, g, or t
  misc_feature (272)..(272): n is a, c, g, or t
  misc_feature (332)..(332): n is a, c, g, or t
  misc_feature (338)..(338): n is a, c, g, or t
  misc_feature (406)..(406): n is a, c, g, or t
  misc_feature (510)..(510): n is a, c, g, or t

SEQ ID NO: 2154 - DNA, 484 bp, Mus musculus
  misc_feature (27)..(27): n is a, c, g, or t
  misc_feature (109)..(109): n is a, c, g, or t
  misc_feature (117)..(117): n is a, c, g, or t
  misc_feature (128)..(128): n is a, c, g, or t
  misc_feature (207)..(207): n is a, c, g, or t
  misc_feature (365)..(385): n is a, c, g, or t
ttgtgggcttactaagtcaacatcttnatcaaattttcacaacatacatgttttaaactgaaagatagttgaatattgaagaatattaagagaagaaaattgacagttntctaaccntcacaattatnttcatttttgtctgtttctatgcaacctatagtcatgcttataatggtgttttacaaaattatagtcataagttttctnactttgtggcattgaggcaaactttctcctcattctgacagcctttcaaattattttagttgaccaaataacagtgacacataagaagtaacattttaactgcgtgtgataggtcacacctatgatcctagcccttggagaactgaggtaggaacatnnnnnnnnnnnnnnnnnnnnnctggaccacacggttagaatgcagtagctaggagagctgtgcagtcctgaaggcatcctttctgcaggagctctgccctcagctgcaaagaggcagtca

SEQ ID NO: 2155 - DNA, 484 bp, Mus musculus; identical to SEQ ID NO: 2154
  misc_feature (27)..(27): n is a, c, g, or t
  misc_feature (109)..(109): n is a, c, g, or t
  misc_feature (117)..(117): n is a, c, g, or t
  misc_feature (128)..(128): n is a, c, g, or t
  misc_feature (207)..(207): n is a, c, g, or t
  misc_feature (365)..(385): n is a, c, g, or t

SEQ ID NO: 2156 - DNA, 418 bp, Mus musculus
  misc_feature (264)..(264): n is a, c, g, or t
  misc_feature (267)..(267): n is a, c, g, or t
  misc_feature (322)..(340): n is a, c, g, or t
cacctctgggacttcacattggcttccccacagacacccctaaaagttcaccccactcagtgacggcctcatcttcctcggtcccagccctgaccccaggcttttccagacattcacccccttctcccttgtgccgtagtctgtctccggggactgggggaggagtccgaggtggggttagctacctgtcccgaggggaccctgtgagggtccttgctcgaagagtgcggcctgacggctctgtgcagtacctagttgagtggngangggggggcatcttctgacagcctgcttctgctcccctccccattcacacactggnnnnnnnnnnnnnnnnnnnctgacctcacctacagctgggatgtacctggagagatggggagtggttctccctcctgcccaggctggaatccagggg

SEQ ID NO: 2157 - DNA, 418 bp, Mus musculus; identical to SEQ ID NO: 2156
  misc_feature (264)..(264): n is a, c, g, or t
  misc_feature (267)..(267): n is a, c, g, or t
  misc_feature (322)..(340): n is a, c, g, or t

SEQ ID NO: 2158 - DNA, 467 bp, Mus musculus
  misc_feature (32)..(32): n is a, c, g, or t
  misc_feature (38)..(38): n is a, c, g, or t
  misc_feature (42)..(42): n is a, c, g, or t
  misc_feature (51)..(52): n is a, c, g, or t
  misc_feature (73)..(73): n is a, c, g, or t
  misc_feature (78)..(78): n is a, c, g, or t
  misc_feature (135)..(149): n is a, c, g, or t
  misc_feature (193)..(207): n is a, c, g, or t
  misc_feature (237)..(260): n is a, c, g, or t
  misc_feature (303)..(303): n is a, c, g, or t
  misc_feature (353)..(353): n is a, c, g, or t
  misc_feature (356)..(358): n is a, c, g, or t
  misc_feature (360)..(360): n is a, c, g, or t
  misc_feature (362)..(363): n is a, c, g, or t
  misc_feature (365)..(365): n is a, c, g, or t
  misc_feature (371)..(371): n is a, c, g, or t
  misc_feature (374)..(374): n is a, c, g, or t
  misc_feature (395)..(395): n is a, c, g, or t
cttaataatgtcaaactctttgggaaaagacntaatgnttgntgtgtctanncagcactcagttgttcccagntcaantatttgagctagaggatggtacgagcagctacaaagattttgcaatgagcaaaaatnnnnnnnnnnnnnnngctggacaagcatctaagaatataatccagccaccgtcatgtgnnnnnnnnnnnnnnnatgttccgctgtgtgtcacagaagagaccnnnnnnnnnnnnnnnnnnnnnnnngaagttcttccgttcatcaaatataaagtgtttgacgcgaaanttccgcgaaaactctgtctgggctattggagtggaagtgcaaaactgatnccnnngnanntntcactncgntcaatcactaccagatacgantcccgaatggatccaacccctatacgttgaagctttgcttttctacatcatcccatttataagaagagaaga

SEQ ID NO: 2159 - DNA, 467 bp, Mus musculus; identical to SEQ ID NO: 2158
  misc_feature (32)..(32): n is a, c, g, or t
  misc_feature (38)..(38): n is a, c, g, or t
  misc_feature (42)..(42): n is a, c, g, or t
  misc_feature (51)..(52): n is a, c, g, or t
  misc_feature (73)..(73): n is a, c, g, or t
  misc_feature (78)..(78): n is a, c, g, or t
  misc_feature (135)..(149): n is a, c, g, or t
  misc_feature (193)..(207): n is a, c, g, or t
  misc_feature (237)..(260): n is a, c, g, or t
  misc_feature (303)..(303): n is a, c, g, or t
  misc_feature (353)..(353): n is a, c, g, or t
  misc_feature (356)..(358): n is a, c, g, or t
  misc_feature (360)..(360): n is a, c, g, or t
  misc_feature (362)..(363): n is a, c, g, or t
  misc_feature (365)..(365): n is a, c, g, or t
  misc_feature (371)..(371): n is a, c, g, or t
  misc_feature (374)..(374): n is a, c, g, or t
  misc_feature (395)..(395): n is a, c, g, or t

SEQ ID NO: 2160 - DNA, 371 bp, Mus musculus
  misc_feature (77)..(78): n is a, c, g, or t
  misc_feature (179)..(194): n is a, c, g, or t
gcttcactaagtgttacatgtatttatatttggagccaaataatgttgtgtattattgataagacagaaatgcttcnntttctcagtatttttttctcacatacctttgtttagttaggtaatggccacaggaaaagtgagcatagaactggacattactggcgatgttttctggtttnnnnnnnnnnnnnnnntttctgcatttctgttctgaattaatcttggtcagagggaatgggtcttaggtaattgagaaaaagataaggggacaaagtagtagagggctcgatacggagatttgtgcattattttgttctaaacttctctctgtccgagatagcataccaggcttccaggagtcaggatggact

SEQ ID NO: 2161 - DNA, 371 bp, Mus musculus; identical to SEQ ID NO: 2160
  misc_feature (77)..(78): n is a, c, g, or t
  misc_feature (179)..(194): n is a, c, g, or t

SEQ ID NO: 2162 - DNA, 481 bp, Mus musculus
  misc_feature (68)..(70): n is a, c, g, or t
  misc_feature (115)..(115): n is a, c, g, or t
  misc_feature (117)..(117): n is a, c, g, or t
  misc_feature (121)..(121): n is a, c, g, or t
  misc_feature (127)..(129): n is a, c, g, or t
  misc_feature (303)..(312): n is a, c, g, or t
acctgggacagagacacaggctggaggatgaggaggatgaggaagaggctgaaggcgggggcttggcnnnccttcgacagtttctagaaagtggggttctggggtcgggtggggnancccnacgagnnnccggttttttccgggaggagatcaccaccttcatcgatgagacacctctgccttctccaactgcgtcaccaggaccctctcctcgtaggcctagaccactgggtttttcacctcgacggctctcccttgggtctccggatagccgagccgttggacttcctttggggttaagtnnnnnnnnnngctgttccctgaccgggagcgaagggagttcaagggcttggggaagaccctgggggccaggtaaccccatcttcccccagttgaccctgtgaggccgcataggcctgcttcactggaggggggggggaggcacgagcgagtgagtatgcctcatcctggccctgagtct

SEQ ID NO: 2163 - DNA, 481 bp, Mus musculus; identical to SEQ ID NO: 2162
  misc_feature (68)..(70): n is a, c, g, or t
  misc_feature (115)..(115): n is a, c, g, or t
  misc_feature (117)..(117): n is a, c, g, or t
  misc_feature (121)..(121): n is a, c, g, or t
  misc_feature (127)..(129): n is a, c, g, or t
  misc_feature (303)..(312): n is a, c, g, or t

SEQ ID NO: 2164 - DNA, 517 bp, Mus musculus
  misc_feature (35)..(35): n is a, c, g, or t
  misc_feature (176)..(176): n is a, c, g, or t
  misc_feature (181)..(182): n is a, c, g, or t
  misc_feature (252)..(252): n is a, c, g, or t
  misc_feature (281)..(281): n is a, c, g, or t
  misc_feature (323)..(323): n is a, c, g, or t
  misc_feature (328)..(328): n is a, c, g, or t
  misc_feature (330)..(330): n is a, c, g, or t
ccagctggacctcagggtgagcagctagtggtgcnagagagactgctggtggttctggacatggaggaggggactcttggctactctattgggggcacgtacctgggaccagccttccgtggactgaaggggaggaccctctatccctctgtaagtgctgtttggggccagtgccnggtcnncatccgctacatgggcgaaagaagagtggaggaaccacaatcccttctgcacctgagccgcctgtgtgtncgccatgctctgggggacacccggctggntcaaatatccactctgcctttgccccctgccatgaagcgctntctgntntacaaatgacccagtagtacagggtgtgctggcaccctaccgtggggacaggtggagaggcacccgctggcctagacaactttaaaaagctggtgaagctggggggggggggctggaccccttcacctccccttctcacaggagcaagacatatagaaatgatattaaacaccatggcagcctggga

SEQ ID NO: 2165 - DNA, 517 bp, Mus musculus; identical to SEQ ID NO: 2164
  misc_feature (35)..(35): n is a, c, g, or t
  misc_feature (176)..(176): n is a, c, g, or t
  misc_feature (181)..(182): n is a, c, g, or t
  misc_feature (252)..(252): n is a, c, g, or t
  misc_feature (281)..(281): n is a, c, g, or t
  misc_feature (323)..(323): n is a, c, g, or t
  misc_feature (328)..(328): n is a, c, g, or t
  misc_feature (330)..(330): n is a, c, g, or t

SEQ ID NO: 2166 - DNA, 212 bp, Mus musculus
tgatattggctaagacctcagtatctcccagtagcacttcttctggatttgaattcaaatgtcattcttaacatttctgttgatgcttctttgaaaatcttcgcttgattttggctgtaaatcacctaccctgttaaatgctgtttaatcccaaggatgtaagttgaggtgaggtgtcttctctgtctgccccattgcactcaactgaatag

SEQ ID NO: 2167 - DNA, 212 bp, Mus musculus; identical to SEQ ID NO: 2166

SEQ ID NO: 2168 - DNA, 432 bp, Mus musculus
  misc_feature (112)..(180): n is a, c, g, or t
  misc_feature (260)..(306): n is a, c, g, or t
  misc_feature (322)..(337): n is a, c, g, or t
  misc_feature (347)..(347): n is a, c, g, or t
  misc_feature (352)..(352): n is a, c, g, or t
  misc_feature (355)..(355): n is a, c, g, or t
  misc_feature (360)..(360): n is a, c, g, or t
  misc_feature (362)..(362): n is a, c, g, or t
  misc_feature (373)..(373): n is a, c, g, or t
ctaggacacagatttttggaacaggctgatgaagacttagctaccggcttggcattgattgacctgggtcagagtatagatatgaaacttttccctaaaggaactgtatttnnnnnnnnnnnnnnnnnnnnnnnnnnnnnnnnnnnnnnnnnnnnnnnnnnnnnnnnnnnnnnnnnnnnnattgattactttggagttgctgcaacaatatactgtatgctctttggctcttacatgaaagtaaaaaatgaaggaggagnnnnnnnnnnnnnnnnnnnnnnnnnnnnnnnnnnnnnnnnnnnnnnntgggaggaattttttnnnnnnnnnnnnnnnntaccggattntcatnatnttccntntttggattttntgagacagaatatgaagaaattacttgaacaacagtattccaacaagattaagaccttg

SEQ ID NO: 2169 - DNA, 432 bp, Mus musculus; identical to SEQ ID NO: 2168
  misc_feature (112)..(180): n is a, c, g, or t
  misc_feature (260)..(306): n is a, c, g, or t
  misc_feature (322)..(337): n is a, c, g, or t
  misc_feature (347)..(347): n is a, c, g, or t
  misc_feature (352)..(352): n is a, c, g, or t
  misc_feature (355)..(355): n is a, c, g, or t
  misc_feature (360)..(360): n is a, c, g, or t
  misc_feature (362)..(362): n is a, c, g, or t
  misc_feature (373)..(373): n is a, c, g, or t

SEQ ID NO: 2170 - DNA, 75 bp, Mus musculus
tgacttcagggctgagacacaatcctcccggtcccttctgctgccttttttaccttgtagctagggctcagcccc

SEQ ID NO: 2171 - DNA, 75 bp, Mus musculus; identical to SEQ ID NO: 2170

SEQ ID NO: 2172 - DNA, 319 bp, Mus musculus
  misc_feature (135)..(135): n is a, c, g, or t
  misc_feature (137)..(137): n is a, c, g, or t
  misc_feature (140)..(140): n is a, c, g, or t
  misc_feature (142)..(144): n is a, c, g, or t
  misc_feature (149)..(155): n is a, c, g, or t
  misc_feature (164)..(164): n is a, c, g, or t
  misc_feature (183)..(183): n is a, c, g, or t
  misc_feature (188)..(188): n is a, c, g, or t
gtactgccacaaaagaatgggggaatgagggctgttgggtcgggggggccggggtttggggagaggcagatgcagtttattgtaatatatggggttagattaatctatggaggacagtacaggctctctggggantnggnannnagggnnnnnnnggggggtgngggggtcaggcccctggcnacagnagggactccctaggaacagaggcactgtcccatcctgggcctgtttcatgctaggggccctggctttctggctcttggctcctgccttgacaaagcccatgccacctggaagtgtccagcttcccttgtcc

SEQ ID NO: 2173 - DNA, 319 bp, Mus musculus; identical to SEQ ID NO: 2172
  misc_feature (135)..(135): n is a, c, g, or t
  misc_feature (137)..(137): n is a, c, g, or t
  misc_feature (140)..(140): n is a, c, g, or t
  misc_feature (142)..(144): n is a, c, g, or t
  misc_feature (149)..(155): n is a, c, g, or t
  misc_feature (164)..(164): n is a, c, g, or t
  misc_feature (183)..(183): n is a, c, g, or t
  misc_feature (188)..(188): n is a, c, g, or t

SEQ ID NO: 2174 - DNA, 177 bp, Mus musculus
gcttcgagatgttccgggagctgaatgaggccttagagttaaaggatgcccatgctacagaggagtctggagacagcagggctcactccagctacctgaagaccaagaagggccagtctacttcccgccataaaaaaacaatggtcaagaaagtggggcctgactcagactgactgc

SEQ ID NO: 2175 - DNA, 177 bp, Mus musculus; identical to SEQ ID NO: 2174

SEQ ID NO: 2176 - DNA, 446 bp, Mus musculus
  misc_feature (54)..(71): n is a, c, g, or t
  misc_feature (270)..(294): n is a, c, g, or t
  misc_feature (330)..(330): n is a, c, g, or t
gagacacagtctcagtaattccccatccggttttacatcttttctcatctctannnnnnnnnnnnnnnnnngactgtgcatgtcacttctgacctcaggatatgtcaacattttagggactgagcattttaaggggtgttttagaatgctgttcttccctgatctctcctttatgcttttaagctgtatttcctgttctggtgtgggactcgttcacagaatcagagcacggagggactctgtcgtggtgcacgttggttgtctgatgtnnnnnnnnnnnnnnnnnnnnnnnnnaactttacattttccagaggaaaggaaacggatttntagtgtccagaccaaaagagccattcacccagagttctcacctgttgtatactggtctgatgaaacctgccctgactcggcctaaacttccgtatgagctgtctccatataatgtt

SEQ ID NO: 2177 - DNA, 446 bp, Mus musculus; identical to SEQ ID NO: 2176
  misc_feature (54)..(71): n is a, c, g, or t
  misc_feature (270)..(294): n is a, c, g, or t
  misc_feature (330)..(330): n is a, c, g, or t

SEQ ID NO: 2178 - DNA, 227 bp, Mus musculus
  misc_feature (58)..(58): n is a, c, g, or t
  misc_feature (132)..(164): n is a, c, g, or t
cttcaaacagagaatttcttctgtgggcctctttgctacaagatggaggacgcagtcnatgcagggttccagtacgagtttttggagtcgatcctccacttccataaaaacctgaaaggactgcatctccannnnnnnnnnnnnnnnnnnnnnnnnnnnnnnnncctcttctcccctggtttctgtatgcaaagctgatgggcctgctggctgacctccggagtata

SEQ ID NO: 2179 - DNA, 227 bp, Mus musculus; identical to SEQ ID NO: 2178
  misc_feature (58)..(58): n is a, c, g, or t
  misc_feature (132)..(164): n is a, c, g, or t

SEQ ID NO: 2180 - DNA, 545 bp, Mus musculus
  misc_feature (31)..(58): n is a, c, g, or t
  misc_feature (233)..(233): n is a, c, g, or t
  misc_feature (307)..(339): n is a, c, g, or t
cgtgttgcctctgctcacacactttgcagannnnnnnnnnnnnnnnnnnnnnnnnnnnatcaagttcaccaaggatctgccgctcttccggtccctaaccatggaggaccagatctcccttctcaagggagcggctgtggaaatattgcatatctcactcaacactacgttctgtcttcaaacagagaatttcttctgtgggcctctttgctacaagatggaggacgcagtcnatgcagggttccagtacgagtttttggagtcgatcctccacttccataaaaacctgaaaggactgcatctccannnnnnnnnnnnnnnnnnnnnnnnnnnnnnnnncctcttctcccctggtttctgtatgcaaagctgatgggcctgctggctgacctccggagtataaacaatgcatactcctatgaacttcagcgcttggaggaactgtctgctatgacgccgctgctcggggagatttgcagttgaggcccaggcttgcatcctttccccagacccccagggatacactggcctggaaagggtacagc

SEQ ID NO: 2181 - DNA, 545 bp, Mus musculus; identical to SEQ ID NO: 2180
  misc_feature (31)..(58): n is a, c, g, or t
  misc_feature (233)..(233): n is a, c, g, or t
  misc_feature (307)..(339): n is a, c, g, or t

SEQ ID NO: 2182 - DNA, 351 bp, Mus musculus
  misc_feature (34)..(134): n is a, c, g, or t
aactgcgggacctgcccaaacttcgagccctggnnnnnnnnnnnnnnnnnnnnnnnnnnnnnnnnnnnnnnnnnnnnnnnnnnnnnnnnnnnnnnnnnnnnnnnnnnnnnnnnnnnnnnnnnnnnnnnnnnnnngatgaccgggcagaggccgaggagatccgtcagaggctgaaggaggaacaggatcaagatctcgatccggaccaggacatggaaccgtacttgccaccagtttagtggctcttccagcctgcagggacagtaaaggaagccatggacactggccccaagaactgataagactccagtgggggaccaccacattcatagccccgtcacaggaagtggg

SEQ ID NO: 2183 - DNA, 351 bp, Mus musculus; identical to SEQ ID NO: 2182
  misc_feature (34)..(134): n is a, c, g, or t

SEQ ID NO: 2184 - DNA, 186 bp, Mus musculus
  misc_feature (96)..(96): n is a, c, g, or t
  misc_feature (112)..(112): n is a, c, g, or t
  misc_feature (115)..(115): n is a, c, g, or t
tttcctcttgtaaaattttgattgggtaactagtgtatcagttatttaatttgataagattctgattctgtttatgtgttagtaaattaaagattntaataaatgatgactntcnctgttgtggaagtcttaagagcataataaactgagtgtaaggcagttacatacgtaacagttgtgtagagg

SEQ ID NO: 2185 - DNA, 186 bp, Mus musculus; identical to SEQ ID NO: 2184
  misc_feature (96)..(96): n is a, c, g, or t
  misc_feature (112)..(112): n is a, c, g, or t
  misc_feature (115)..(115): n is a, c, g, or t

SEQ ID NO: 2186 - DNA, 292 bp, Mus musculus
  misc_feature (107)..(107): n is a, c, g, or t
  misc_feature (109)..(109): n is a, c, g, or t
  misc_feature (116)..(116): n is a, c, g, or t
  misc_feature (183)..(184): n is a, c, g, or t
  misc_feature (187)..(192): n is a, c, g, or t
  misc_feature (265)..(265): n is a, c, g, or t
gttgaagcagtcatacattgcttagattcccagtagatcccatgatggaaatatttaaagatgaacttggaaatactgaaattagactatcaggttctgttaaattntntcgtatntcttgcttaatttctgttcattaatttatatccatccaattataaagtaaatttggaggaaacagcnnaannnnnnccatatttttagtgataactctttttaaattcttatgttttctaattatacacttgtgtgtcatcaagtattntagtcagacttttttcccaggttctca

SEQ ID NO: 2187 - DNA, 292 bp, Mus musculus; identical to SEQ ID NO: 2186
  misc_feature (107)..(107): n is a, c, g, or t
  misc_feature (109)..(109): n is a, c, g, or t
  misc_feature (116)..(116): n is a, c, g, or t
  misc_feature (183)..(184): n is a, c, g, or t
  misc_feature (187)..(192): n is a, c, g, or t
  misc_feature (265)..(265): n is a, c, g, or t

SEQ ID NO: 2188 - DNA, 241 bp, Mus musculus
  misc_feature (142)..(142): n is a, c, g, or t
cacctgggaaggtggcatctatgacttcattggggaattcatgaaggccagtgtggatgtggcagacctgataggcctaaaccttgtcatgtctcggaatgcaggcaagggggagtacaagattatggttgctgccctgggntgggccactgctgaactcattatgtcccgatgcatccccctctgggtgggagcccgaggcattgaatttgactggaaatatatccagatgagcattgac

SEQ ID NO: 2189 - DNA, 241 bp, Mus musculus; identical to SEQ ID NO: 2188
  misc_feature (142)..(142): n is a, c, g, or t

SEQ ID NO: 2190 - DNA, 271 bp, Mus musculus
  misc_feature (53)..(102): n is a, c, g, or t
agccaacttaaagtgttctaatctgccacttcaggatttacttcagcatttgnnnnnnnnnnnnnnnnnnnnnnnnnnnnnnnnnnnnnnnnnnnnnnnnnnaggacatgtcactcagcactggctcagagatgggggtcaaaacatttttcacactctgttcatgcaagtcttagacatctggtggtttgtgactgtaatgtaatcccagcaatcaggaaaccacagcaagaagaaccacaactacattgctgtgaattggaggtcagtc

SEQ ID NO: 2191 - DNA, 271 bp, Mus musculus; identical to SEQ ID NO: 2190
  misc_feature (53)..(102): n is a, c, g, or t

SEQ ID NO: 2192 - DNA, 424 bp, Mus musculus
  misc_feature (317)..(317): n is a, c, g, or t
  misc_feature (326)..(326): n is a, c, g, or t
  misc_feature (355)..(355): n is a, c, g, or t
  misc_feature (357)..(357): n is a, c, g, or t
  misc_feature (361)..(361): n is a, c, g, or t
  misc_feature (365)..(365): n is a, c, g, or t
  misc_feature (367)..(386): n is a, c, g, or t
  misc_feature (388)..(396): n is a, c, g, or t
gacattgagagtttctctttcctcaaccgggccctggagagcgacatggcgcctgtcctcatcatggccaccaaccgagggatcacccggatccgaggcaccagctaccagagtccccacggcatccccatcgacctgctggaccgcttgctcattgtatcaacgtcaccctacagtgagaaggataccaagcagattctgcgcatccgctgtgaggaggaagatgtggagatgagtgaggacgcctacacagtgctgacccgcattgggctcgagacctccctgcgctatgccatccagctcatcacagcggccancctggtgtnccggaaacgaaagggcaccgaggtgcagntngatnacantnnnnnnnnnnnnnnnnnnnntnnnnnnnnnatcccgctccacacagtacatgaaggag

SEQ ID NO: 2193 - DNA, 424 bp, Mus musculus; identical to SEQ ID NO: 2192
  misc_feature (317)..(317): n is a, c, g, or t
  misc_feature (326)..(326): n is a, c, g, or t
  misc_feature (355)..(355): n is a, c, g, or t
  misc_feature (357)..(357): n is a, c, g, or t
  misc_feature (361)..(361): n is a, c, g, or t
  misc_feature (365)..(365): n is a, c, g, or t
  misc_feature (367)..(386): n is a, c, g, or t
  misc_feature (388)..(396): n is a, c, g, or t

SEQ ID NO: 2194 - DNA, 573 bp, Mus musculus
  misc_feature (29)..(29): n is a, c, g, or t
  misc_feature (48)..(48): n is a, c, g, or t
  misc_feature (74)..(74): n is a, c, g, or t
  misc_feature (76)..(76): n is a, c, g, or t
  misc_feature (115)..(115): n is a, c, g, or t
  misc_feature (117)..(117): n is a, c, g, or t
  misc_feature (119)..(134): n is a, c, g, or t
  misc_feature (157)..(157): n is a, c, g, or t
  misc_feature (202)..(202): n is a, c, g, or t
  misc_feature (258)..(258): n is a, c, g, or t
  misc_feature (295)..(296): n is a, c, g, or t
  misc_feature (299)..(301): n is a, c, g, or t
  misc_feature (340)..(356): n is a, c, g, or t
cattatcaaagcagcaccaaggaaacgtntccccgatcaccacccctnttaagcattcccatttgctgatgaantntgggccagttcatagcaaagttgtacttggaagacttcnancnnnnnnnnnnnnnnnntggaattgacctgtccatgatanccttaagtttgaacattagctgaccttctgtgttaaacatgggtntaatttatttactgtttcattttccatacaattcagttgatttacaagttcatttntcatactgtgtattaaaataaaaatccagttacttannccnnnaaaaaaaaaaaaaaaaaaagaaaaaaaaaaaaaaacaannnnnnnnnnnnnnnnnttgggggggaattatgttgattggtgggtggagaggggtttttataaaggtgggtggacaacaaggggtgtaaaaaatatgtgtgttggccccccttcctccgtggggtggggtatagaaaggccggcccctcatcttaaggaggcctgcctgcggttggtgtggcgaataacagggggttttttcttttaggcgccacaaaggtgtgtttctcccc

SEQ ID NO: 2195 - DNA, 573 bp, Mus musculus; identical to SEQ ID NO: 2194
  misc_feature (29)..(29): n is a, c, g, or t
  misc_feature (48)..(48): n is a, c, g, or t
  misc_feature (74)..(74): n is a, c, g, or t
  misc_feature (76)..(76): n is a, c, g, or t
  misc_feature (115)..(115): n is a, c, g, or t
  misc_feature (117)..(117): n is a, c, g, or t
  misc_feature (119)..(134): n is a, c, g, or t
  misc_feature (157)..(157): n is a, c, g, or t
  misc_feature (202)..(202): n is a, c, g, or t
  misc_feature (258)..(258): n is a, c, g, or t
  misc_feature (295)..(296): n is a, c, g, or t
  misc_feature (299)..(301): n is a, c, g, or t
  misc_feature (340)..(356): n is a, c, g, or t

SEQ ID NO: 2196 - DNA, 488 bp, Mus musculus
  misc_feature (86)..(129): n is a, c, g, or t
  misc_feature (236)..(236): n is a, c, g, or t
  misc_feature (238)..(238): n is a, c, g, or t
  misc_feature (245)..(245): n is a, c, g, or t
  misc_feature (259)..(259): n is a, c, g, or t
  misc_feature (262)..(265): n is a, c, g, or t
  misc_feature (268)..(268): n is a, c, g, or t
  misc_feature (272)..(272): n is a, c, g, or t
  misc_feature (274)..(274): n is a, c, g, or t
  misc_feature (279)..(280): n is a, c, g, or t
  misc_feature (295)..(295): n is a, c, g, or t
  misc_feature (298)..(298): n is a, c, g, or t
  misc_feature (302)..(302): n is a, c, g, or t
  misc_feature (310)..(310): n is a, c, g, or t
  misc_feature (312)..(312): n is a, c, g, or t
  misc_feature (317)..(317): n is a, c, g, or t
  misc_feature (319)..(319): n is a, c, g, or t
  misc_feature (321)..(321): n is a, c, g, or t
  misc_feature (324)..(324): n is a, c, g, or t
  misc_feature (336)..(336): n is a, c, g, or t
  misc_feature (344)..(344): n is a, c, g, or t
  misc_feature (374)..(374): n is a, c, g, or t
  misc_feature (396)..(398): n is a, c, g, or t
  misc_feature (401)..(401): n is a, c, g, or t
  misc_feature (403)..(403): n is a, c, g, or t
  misc_feature (416)..(416): n is a, c, g, or t
  misc_feature (418)..(418): n is a, c, g, or t
  misc_feature (429)..(429): n is a, c, g, or t
  misc_feature (431)..(431): n is a, c, g, or t
  misc_feature (438)..(438): n is a, c, g, or t
  misc_feature (448)..(448): n is a, c, g, or t
  misc_feature (451)..(451): n is a, c, g, or t
  misc_feature (455)..(455): n is a, c, g, or t
  misc_feature (457)..(461): n is a, c, g, or t
  misc_feature (463)..(463): n is a, c, g, or t
gaacccccagactcgaattcctagaacctttgaccgattttgtggcctcatggttcagcttttacacaaactgagcgtccgagcannnnnnnnnnnnnnnnnnnnnnnnnnnnnnnnnnnnnnnnnnnngtccgaccacttcccagttggctgtatgaaaattggcacttccttttctgttgaagacatcagtgacattcgagagttggtgcccagtagtgacccagttgtgtttntngtggggncctttgcccatggncannnnagntcantntgganntacacagaaaagatngtntccntcagcaantntccantntntgntgcgcttacctntgctaaantcaccacagcttttgaagaagtatggggtntcatttgagcccagcagggccnnnttntnagacaggaaggantnttggcagtttntnttttggntcctaagatntgntggnannnnntnttctgtaccaagactgcagagtggg

SEQ ID NO: 2197 - DNA, 488 bp, Mus musculus; identical to SEQ ID NO: 2196
  misc_feature (86)..(129): n is a, c, g, or t
  misc_feature (236)..(236): n is a, c, g, or t
  misc_feature (238)..(238): n is a, c, g, or t
  misc_feature (245)..(245): n is a, c, g, or t
  misc_feature (259)..(259): n is a, c, g, or t
  misc_feature (262)..(265): n is a, c, g, or t
  misc_feature (268)..(268): n is a, c, g, or t
  misc_feature (272)..(272): n is a, c, g, or t
  misc_feature (274)..(274): n is a, c, g, or t
  misc_feature (279)..(280): n is a, c, g, or t
  misc_feature (295)..(295): n is a, c, g, or t
  misc_feature (298)..(298): n is a, c, g, or t
  misc_feature (302)..(302): n is a, c, g, or t
  misc_feature (310)..(310): n is a, c, g, or t
  misc_feature (312)..(312): n is a, c, g, or t
  misc_feature (317)..(317): n is a, c, g, or t
  misc_feature (319)..(319): n is a, c, g, or t
  misc_feature (321)..(321): n is a, c, g, or t
  misc_feature (324)..(324): n is a, c, g, or t
  misc_feature (336)..(336): n is a, c, g, or t
  misc_feature (344)..(344): n is a, c, g, or t
  misc_feature (374)..(374): n is a, c, g, or t
  misc_feature (396)..(398): n is a, c, g, or t
  misc_feature (401)..(401): n is a, c, g, or t
  misc_feature (403)..(403): n is a, c, g, or t
  misc_feature (416)..(416): n is a, c, g, or t
  misc_feature (418)..(418): n is a, c, g, or t
  misc_feature (429)..(429): n is a, c, g, or t
  misc_feature (431)..(431): n is a, c, g, or t
  misc_feature (438)..(438): n is a, c, g, or t
  misc_feature (448)..(448): n is a, c, g, or t
  misc_feature (451)..(451): n is a, c, g, or t
  misc_feature (455)..(455): n is a, c, g, or t
  misc_feature (457)..(461): n is a, c, g, or t
  misc_feature (463)..(463): n is a, c, g, or t

SEQ ID NO: 2198 - DNA, 456 bp, Mus musculus
  misc_feature (31)..(31): n is a, c, g, or t
  misc_feature (118)..(118): n is a, c, g, or t
  misc_feature (251)..(251): n is a, c, g, or t
  misc_feature (266)..(266): n is a, c, g, or t
  misc_feature (274)..(274): n is a, c, g, or t
  misc_feature (286)..(286): n is a, c, g, or t
  misc_feature (321)..(321): n is a, c, g, or t
  misc_feature (324)..(324): n is a, c, g, or t
  misc_feature (330)..(330): n is a, c, g, or t
  misc_feature (333)..(333): n is a, c, g, or t
  misc_feature (337)..(337): n is a, c, g, or t
  misc_feature (340)..(340): n is a, c, g, or t
  misc_feature (347)..(372): n is a, c, g, or t
  misc_feature (375)..(375): n is a, c, g, or t
  misc_feature (398)..(415): n is a, c, g, or t
agctactgatggtggcgctcaccatccagangtggcactggctcatgacagtggccgagctactcagcctggcctgctacattgcctccctggtgttcctccatgagttcatcgatgntctacttcattgccaccctgtcattcctctggaaggtgtccgtcatcaccttggtcagctgtctccccctctatgtcctcaagtacctgcggagacggttctccccacccagctactcgaagctcacttcctnaagctgcagggctgncctcgggnagggcctccggnctccggcgctctcccaggaggaggtcaagttccanacncacganccncctnagntggacgnnnnnnnnnnnnnnnnnnnnnnnnnnttngctgaggcgacactgggcacctnnnnnnnnnnnnnnnnnngtggaaccggagggaggggcctgagagctgtacctatcaga

SEQ ID NO: 2199 - DNA, 456 bp, Mus musculus; identical to SEQ ID NO: 2198
  misc_feature (31)..(31): n is a, c, g, or t
  misc_feature (118)..(118): n is a, c, g, or t
  misc_feature (251)..(251): n is a, c, g, or t
  misc_feature (266)..(266): n is a, c, g, or t
  misc_feature (274)..(274): n is a, c, g, or t
  misc_feature (286)..(286): n is a, c, g, or t
  misc_feature (321)..(321): n is a, c, g, or t
  misc_feature (324)..(324): n is a, c, g, or t
  misc_feature (330)..(330): n is a, c, g, or t
  misc_feature (333)..(333): n is a, c, g, or t
  misc_feature (337)..(337): n is a, c, g, or t
  misc_feature (340)..(340): n is a, c, g, or t
  misc_feature (347)..(372): n is a, c, g, or t
  misc_feature (375)..(375): n is a, c, g, or t
  misc_feature (398)..(415): n is a, c, g, or t

SEQ ID NO: 2200 - DNA, 406 bp, Mus musculus
  misc_feature (41)..(46): n is a, c, g, or t
  misc_feature (48)..(48): n is a, c, g, or t
  misc_feature (50)..(51): n is a, c, g, or t
  misc_feature (58)..(58): n is a, c, g, or t
  misc_feature (67)..(67): n is a, c, g, or t
  misc_feature (74)..(75): n is a, c, g, or t
  misc_feature (97)..(97): n is a, c, g, or t
  misc_feature (100)..(100): n is a, c, g, or t
  misc_feature (102)..(102): n is a, c, g, or t
  misc_feature (110)..(111): n is a, c, g, or t
  misc_feature (157)..(157): n is a, c, g, or t
  misc_feature (159)..(160): n is a, c, g, or t
  misc_feature (163)..(163): n is a, c, g, or t
  misc_feature (165)..(168): n is a, c, g, or t
  misc_feature (178)..(179): n is a, c, g, or t
  misc_feature (184)..(184): n is a, c, g, or t
  misc_feature (187)..(187): n is a, c, g, or t
  misc_feature (190)..(192): n is a, c, g, or t
  misc_feature (195)..(195): n is a, c, g, or t
  misc_feature (197)..(197): n is a, c, g, or t
  misc_feature (199)..(199): n is a, c, g, or t
  misc_feature (214)..(214): n is a, c, g, or t
  misc_feature (222)..(222): n is a, c, g, or t
  misc_feature (232)..(232): n is a, c, g, or t
  misc_feature (237)..(237): n is a, c, g, or t
  misc_feature (248)..(248): n is a, c, g, or t
  misc_feature (263)..(263): n is a, c, g, or t
  misc_feature (267)..(267): n is a, c, g, or t
  misc_feature (283)..(283): n is a, c, g, or t
  misc_feature (294)..(295): n is a, c, g, or t
  misc_feature (299)..(299): n is a, c, g, or t
  misc_feature (303)..(304): n is a, c, g, or t
  misc_feature (314)..(314): n is a, c, g, or t
  misc_feature (318)..(318): n is a, c, g, or t
  misc_feature (328)..(328): n is a, c, g, or t
  misc_feature (330)..(330): n is a, c, g, or t
  misc_feature (333)..(333): n is a, c, g, or t
  misc_feature (358)..(359): n is a, c, g, or t
gacatcttattactggaaggatatccttctccaggcacatnnnnnntntnncagaagnttagttagnggctttnnaagttcaagtggccacagaaanttncnggttatgnnccattctattaagaataggggtatggagtagaggagacatcaaatntnngcnannnntaaaagtagnnaaaangtntannntgngncntctccacttccattntgatttantctctcccanaatanattttggtgtngtggaagtcaagacngtgnttggatgagttagaantcaggatttanntccntganntggccatgtntttnttgtaattcntntanttttagtagaaagaatctttccttnnatatttagttacactgtatgatcgcacttggttcagcccgagacatc

SEQ ID NO: 2201 - DNA, 406 bp, Mus musculus; identical to SEQ ID NO: 2200
  misc_feature (41)..(46): n is a, c, g, or t
  misc_feature (48)..(48): n is a, c, g, or t
  misc_feature (50)..(51): n is a, c, g, or t
  misc_feature (58)..(58): n is a, c, g, or t
  misc_feature (67)..(67): n is a, c, g, or t
  misc_feature (74)..(75): n is a, c, g, or t
  misc_feature (97)..(97): n is a, c, g, or t
  misc_feature (100)..(100): n is a, c, g, or t
  misc_feature (102)..(102): n is a, c, g, or t
  misc_feature (110)..(111): n is a, c, g, or t
  misc_feature (157)..(157): n is a, c, g, or t
  misc_feature (159)..(160): n is a, c, g, or t
  misc_feature (163)..(163): n is a, c, g, or t
  misc_feature (165)..(168): n is a, c, g, or t
  misc_feature (178)..(179): n is a, c, g, or t
  misc_feature (184)..(184): n is a, c, g, or t
  misc_feature (187)..(187): n is a, c, g, or t
  misc_feature (190)..(192): n is a, c, g, or t
  misc_feature (195)..(195): n is a, c, g, or t
  misc_feature (197)..(197): n is a, c, g, or t
  misc_feature (199)..(199): n is a, c, g, or t
  misc_feature (214)..(214): n is a, c, g, or t
  misc_feature (222)..(222): n is a, c, g, or t
  misc_feature (232)..(232): n is a, c, g, or t
  misc_feature (237)..(237): n is a, c, g, or t
  misc_feature (248)..(248): n is a, c, g, or t
  misc_feature (263)..(263): n is a, c, g, or t
  misc_feature (267)..(267): n is a, c, g, or t
  misc_feature (283)..(283): n is a, c, g, or t
  misc_feature (294)..(295): n is a, c, g, or t
  misc_feature (299)..(299): n is a, c, g, or t
  misc_feature (303)..(304): n is a, c, g, or t
  misc_feature (314)..(314): n is a, c, g, or t
  misc_feature (318)..(318): n is a, c, g, or t
  misc_feature (328)..(328): n is a, c, g, or t
  misc_feature (330)..(330): n is a, c, g, or t
  misc_feature (333)..(333): n is a, c, g, or t
  misc_feature (358)..(359): n is a, c, g, or t

SEQ ID NO: 2202 - DNA, 354 bp, Mus musculus
  misc_feature (290)..(290): n is a, c, g, or t
  misc_feature (327)..(327): n is a, c, g, or t
tgaaaagctctttgatgactccgatgagaaggaagatgaagaagacacagatggaaagaaagatgatgatgccagtgacaaggtattcgaagacaattccaatgagaagttgtttgatgaggaagaaggtcccaatgagaagttgtttgatgattctgatgagagagggactgtggggaatgtgaaggaagatgggtctcagtccacagacagcagctttgccctcagtagtagtgatgatgatgatgatgaagtgtaatcttttccagttgcttcttagggagagcccngcatctccatttgcccatgcttcagggtcaatagtantgttacagcaacatgtgcatagtggta

SEQ ID NO: 2203 - DNA, 354 bp, Mus musculus; identical to SEQ ID NO: 2202
  misc_feature (290)..(290): n is a, c, g, or t
  misc_feature (327)..(327): n is a, c, g, or t

SEQ ID NO: 2204 - DNA, 162 bp, Mus musculus
cctcggagcgccagcatttcaggggacctggccgactcccactccccgctcccttccagccacgctgccttaagtcgccgctccggactcccgcggactgagccccgggcgggccggccggggctggagccgcgcgctgtgtagagtcctcgggcctcccgg

SEQ ID NO: 2205 - DNA, 162 bp, Mus musculus; identical to SEQ ID NO: 2204

SEQ ID NO: 2206 - DNA, 326 bp, Mus musculus
  misc_feature (123)..(158): n is a, c, g, or t
atcaggtccttaacgccctggtacgaggggaccaagggccctagcaggtcagggccctggaggagtcagatcaggagctgtggctccctgctttggcgatatggagacttcccgctgaccaannnnnnnnnnnnnnnnnnnnnnnnnnnnnnnnnnnncccagatctgggctctgggtccatcagggggctgggggggtgctgttgggcctcacagctcagaccttgccccattgagttttatttatttaaatagtagttggatgcttggcacatgaactgaaataggagagccctcaccctgtcagttttcttaacttacaagtg

SEQ ID NO: 2207 - DNA, 326 bp, Mus musculus; identical to SEQ ID NO: 2206
  misc_feature (123)..(158): n is a, c, g, or t

SEQ ID NO: 2208 - DNA, 255 bp, Mus musculus
  misc_feature (52)..(82): n is a, c, g, or t
  misc_feature (84)..(84): n is a, c, g, or t
  misc_feature (93)..(93): n is a, c, g, or t
  misc_feature (96)..(96): n is a, c, g, or t
  misc_feature (98)..(99): n is a, c, g, or t
  misc_feature (101)..(128): n is a, c, g, or t
  misc_feature (130)..(132): n is a, c, g, or t
  misc_feature (209)..(229): n is a, c, g, or t
tgacactgtggtggccgtggatgggcggatcctggagaagccgagggaccgnnnnnnnnnnnnnnnnnnnnnnnnnnnnnnngngtgggaagnagnanngnnnnnnnnnnnnnnnnnnnnnnnnnnnntnnntcggctgtgaaggccccacccaggaagtgacggccttccacgaggagacgcgcttgacgttctcgcccctttcagannnnnnnnnnnnnnnnnnnnnggcagcgggacaaggccggggcctac

SEQ ID NO: 2209 - DNA, 255 bp, Mus musculus; identical to SEQ ID NO: 2208
  misc_feature (52)..(82): n is a, c, g, or t
  misc_feature (84)..(84): n is a, c, g, or t
  misc_feature (93)..(93): n is a, c, g, or t
  misc_feature (96)..(96): n is a, c, g, or t
  misc_feature (98)..(99): n is a, c, g, or t
  misc_feature (101)..(128): n is a, c, g, or t
  misc_feature (130)..(132): n is a, c, g, or t
  misc_feature (209)..(229): n is a, c, g, or t

SEQ ID NO: 2210 - DNA, 420 bp, Mus musculus
ccactgagcaggagtttagggcccggaaagctgcacggccaggagggcgggaaagagcacggctggctaatgtcgaggaccaggcccgatccaacagagggctccttgccaagatctttggagcccctctacctgcagagagcaaggaaaaaccgtagtcaataagggactcctggtgatggaagaaatacctaccagccctgcgccattctgatctgcttcctgaagagtgtgaccatctaggcagatgttttctctattccacacaccaagagtctggtaaaggccttttgttggtgtcttttacctactttgaacaaatcctgtaagtgccagcctgagaaccttactcgtcctatccagggtgaagaccactggaggtgcctgttgtgttttgtttgatttctgattgcctgcctc

SEQ ID NO: 2211 - DNA, 420 bp, Mus musculus; identical to SEQ ID NO: 2210

SEQ ID NO: 2212 - DNA, 65 bp, Mus musculus
  misc_feature (32)..(32): n is a, c, g, or t
aaactttatctgcaaagccgagagctgccacntgtttcagccaggaatcagacacgtggcgagag

SEQ ID NO: 2213 - DNA, 65 bp, Mus musculus; identical to SEQ ID NO: 2212
  misc_feature (32)..(32): n is a, c, g, or t

SEQ ID NO: 2214 - DNA, 134 bp, Mus musculus
ccaacccttgttaggcttgtgttgtctacattttcaattttggaagttgaagtttttcttatgttacttaatgctagtatcttttaggctaaaactattttctatttaaggcagactaatttccagtttctctt

SEQ ID NO: 2215 - DNA, 134 bp, Mus musculus; identical to SEQ ID NO: 2214

SEQ ID NO: 2216 - DNA, 150 bp, Mus musculus
  misc_feature (42)..(42): n is a, c, g, or t
  misc_feature (59)..(59): n is a, c, g, or t
  misc_feature (65)..(65): n is a, c, g, or t
  misc_feature (85)..(85): n is a, c, g, or t
  misc_feature (88)..(88): n is a, c, g, or t
  misc_feature (91)..(91): n is a, c, g, or t
aaggaaggacactgtccgggcttgacactgaattggagttgnccagagcatgggggagnttaggncacacaagggccagtacagnggnccnttgtggccagggatgattgattgggatgctagaacttgtgtccaaaggaacagtggaag

SEQ ID NO: 2217 - DNA, 150 bp, Mus musculus; identical to SEQ ID NO: 2216
  misc_feature (42)..(42): n is a, c, g, or t
  misc_feature (59)..(59): n is a, c, g, or t
  misc_feature (65)..(65): n is a, c, g, or t
  misc_feature (85)..(85): n is a, c, g, or t
  misc_feature (88)..(88): n is a, c, g, or t
  misc_feature (91)..(91): n is a, c, g, or t

SEQ ID NO: 2218 - DNA, 377 bp, Mus musculus
  misc_feature (52)..(52): n is a, c, g, or t
  misc_feature (84)..(98): n is a, c, g, or t
  misc_feature (131)..(131): n is a, c, g, or t
  misc_feature (305)..(305): n is a, c, g, or t
catcagcacggaaactacagcgacaaattctgataacccagggcagtagatntccttccaggcccagggcttgtgacttgaacnnnnnnnnnnnnnnnaccctgcaccccttgcttcagtggctgaactcngtctccttccattggaggttgttttctaggctcaacactgaacagctgattagccatgtaatttatctggtcttaaatgataatggatttttgaagcactaaaaggatttagggtttatcgttaaaacaaaattcctggactttaatattcttaataaatcctcacttccccanaaatggctcttttgtaggaatgggacaatggaaggtcatgtagaaggtactgggttctaatgagagaatacc

SEQ ID NO: 2219 - DNA, 377 bp, Mus musculus; identical to SEQ ID NO: 2218
  misc_feature (52)..(52): n is a, c, g, or t
  misc_feature (84)..(98): n is a, c, g, or t
  misc_feature (131)..(131): n is a, c, g, or t
  misc_feature (305)..(305): n is a, c, g, or t

SEQ ID NO: 2220 - DNA, 559 bp, Mus musculus
  misc_feature (336)..(534): n is a, c, g, or t
tccgggtccgagaggaactgtgaatggctgagcctgcttctcaggatcaggccactcaacttgggaaggaactgatgagaaggctctggaggatatcaggaacatagtagcatgccaagtctaccatctcggggacttacaagggctaccagaccctggactcacaagcttgctacacagacttagcctacagcacatcaggcccgggagccaggtctggccccagctgagggacctgcaaggtccccaggacagacaaaaatcactatgcctccctgaaaggcaggcatgtggaggagtgcagagcaactgcttctaataagaaacacacagagnnnnnnnnnnnnnnnnnnnnnnnnnnnnnnnnnnnnnnnnnnnnnnnnnnnnnnnnnnnnnnnnnnnnnnnnnnnnnnnnnnnnnnnnnnnnnnnnnnnnnnnnnnnnnnnnnnnnnnnnnnnnnnnnnnnnnnnnnnnnnnnnnnnnnnnnnnnnnnnnnnnnnnnnnnnnnnnnnnnnnnnnnnnnnnnnnnnnnnngaaacacacagaggagacagtccca

SEQ ID NO: 2221 - DNA, 559 bp, Mus musculus; identical to SEQ ID NO: 2220
  misc_feature (336)..(534): n is a, c, g, or t

SEQ ID NO: 2222 - DNA, 562 bp, Mus musculus
  misc_feature (226)..(273): n is a, c, g, or t
  misc_feature (283)..(306): n is a, c, g, or t
  misc_feature (312)..(312): n is a, c, g, or t
  misc_feature (455)..(455): n is a, c, g, or t
cgtcctggaccaagcgggacagagagccctgggtactgcctgggccaaggagcagcagaaagccagggacgggagagagggcagccgcctgtggacggagggcgagaagcagcaactcctgagcacgggacgggtacaaggttatgagggctattacgtacttccggtggaacagtacccggagctggcagacagtagcagcaacatccagttcttaagacagaannnnnnnnnnnnnnnnnnnnnnnnnnnnnnnnnnnnnnnnnnnnnnnnggtggctcannnnnnnnnnnnnnnnnnnnnnnncctaanggagacgaagacctaacggggcactgaggccgggctgctttaggatcccaagtggcaagaaagctcacattttttgagttcaaatgctactgtctaagcgcaaagtccctcatcctgaagtagactagagcccggccacaaanttctgaggaaaaacaaaaactaaaggatgaacgaacgaacgaacgaatgaaaacacacacaaaatgtttcaagttcccctaaaatatgacccacttgttccgggtct

SEQ ID NO: 2223 - DNA, 562 bp, Mus musculus; identical to SEQ ID NO: 2222
  misc_feature (226)..(273): n is a, c, g, or t
  misc_feature (283)..(306): n is a, c, g, or t
  misc_feature (312)..(312): n is a, c, g, or t
  misc_feature (455)..(455): n is a, c, g, or t

SEQ ID NO: 2224 - DNA, 127 bp, Mus musculus
agggacatgctgcagagccacaccaaactgcagtcagccaccaatgtgccggcccacccccctgcctccctggttcccccaccagccacaggactggcacctctgcccacgaataaagtagctatgt

SEQ ID NO: 2225 - DNA, 127 bp, Mus musculus; identical to SEQ ID NO: 2224

SEQ ID NO: 2226 - DNA, 439 bp, Mus musculus
  misc_feature (271)..(271): n is a, c, g, or t
  misc_feature (332)..(332): n is a, c, g, or t
caagctgtgtgcttggccatggcgagggtgggagcagcagctcggggcctccggtccacttcccatgtcacagcctcctctgcctccagcccatccaactagagctggctagcatgaagggagacagcggttcccaactggagtacagaggtaagggccaataaagaggacaggaggtggcttcccttcagcagaggctgctgtctgtccccagaggacctcttgccttctgaactgtgcacaaaggcaagaccaggatggggaagcaggnaacagagggggtttgtctccgcatttcctcctctgcctgctctgtttactgtgctccagtncagtgccctggtccttgggagccctcactcctggccaggctgacatcccttcctagctccgaacgctggggatgaggggcagccaggagccgggacttgttaatggt

SEQ ID NO: 2227 - DNA, 439 bp, Mus musculus; identical to SEQ ID NO: 2226
  misc_feature (271)..(271): n is a, c, g, or t
  misc_feature (332)..(332): n is a, c, g, or t

SEQ ID NO: 2228 - DNA, 389 bp, Mus musculus
  misc_feature (37)..(37): n is a, c, g, or t
  misc_feature (48)..(48): n is a, c, g, or t
  misc_feature (51)..(52): n is a, c, g, or t
  misc_feature (54)..(54): n is a, c, g, or t
  misc_feature (71)..(71): n is a, c, g, or t
  misc_feature (74)..(74): n is a, c, g, or t
  misc_feature (80)..(80): n is a, c, g, or t
  misc_feature (107)..(107): n is a, c, g, or t
  misc_feature (119)..(119): n is a, c, g, or t
  misc_feature (122)..(122): n is a, c, g, or t
  misc_feature (126)..(126): n is a, c, g, or t
  misc_feature (132)..(132): n is a, c, g, or t
  misc_feature (136)..(136): n is a, c, g, or t
  misc_feature (138)..(138): n is a, c, g, or t
  misc_feature (190)..(190): n is a, c, g, or t
  misc_feature (303)..(303): n is a, c, g, or t
  misc_feature (305)..(305): n is a, c, g, or t
  misc_feature (310)..(314): n is a, c, g, or t
  misc_feature (316)..(318): n is a, c, g, or t
  misc_feature (320)..(324): n is a, c, g, or t
  misc_feature (327)..(327): n is a, c, g, or t
  misc_feature (332)..(332): n is a, c, g, or t
  misc_feature (334)..(334): n is a, c, g, or t
  misc_feature (336)..(336): n is a, c, g, or t
  misc_feature (339)..(339): n is a, c, g, or t
  misc_feature (348)..(348): n is a, c, g, or t
  misc_feature (355)..(355): n is a, c, g, or t
ggggttgccaaaactgcactttactgaggggtttgtntccagcattanatnntntgcctgagtgatcacancantaaatntgattaaaatccattacagaaagaganttaatggggacnttnatgnttgagntttntnttgaagataggaggacacagatgacccagagaattgcatacaggtgggaatnttgtatatatctgtaagtattgtatagaattgcttatatacaaaggtgaattttttaaagacacagttgtacactgaattttgtatatttgttaataaactttttattatttntnttgannnnnannnannnnnaangtgtntntntanatctgaagnagaaacnttcctgaaaacaacacagggtttatgaattcata

SEQ ID NO: 2229 - DNA, 389 bp, Mus musculus; identical to SEQ ID NO: 2228
  misc_feature (37)..(37): n is a, c, g, or t
  misc_feature (48)..(48): n is a, c, g, or t
  misc_feature (51)..(52): n is a, c, g, or t
  misc_feature (54)..(54): n is a, c, g, or t
  misc_feature (71)..(71): n is a, c, g, or t
  misc_feature (74)..(74): n is a, c, g, or t
  misc_feature (80)..(80): n is a, c, g, or t
  misc_feature (107)..(107): n is a, c, g, or t
  misc_feature (119)..(119): n is a, c, g, or t
  misc_feature (122)..(122): n is a, c, g, or t
  misc_feature (126)..(126): n is a, c, g, or t
  misc_feature (132)..(132): n is a, c, g, or t
  misc_feature (136)..(136): n is a, c, g, or t
  misc_feature (138)..(138): n is a, c, g, or t
  misc_feature (190)..(190): n is a, c, g, or t
  misc_feature (303)..(303): n is a, c, g, or t
  misc_feature (305)..(305): n is a, c, g, or t
  misc_feature (310)..(314): n is a, c, g, or t
  misc_feature (316)..(318): n is a, c, g, or t
  misc_feature (320)..(324): n is a, c, g, or t
  misc_feature (327)..(327): n is a, c, g, or t
  misc_feature (332)..(332): n is a, c, g, or t
  misc_feature (334)..(334): n is a, c, g, or t
  misc_feature (336)..(336): n is a, c, g, or t
  misc_feature (339)..(339): n is a, c, g, or t
  misc_feature (348)..(348): n is a, c, g, or t
  misc_feature (355)..(355): n is a, c, g, or t

SEQ ID NO: 2230 - DNA, 477 bp, Mus musculus
  misc_feature (87)..(87): n is a, c, g, or t
  misc_feature (106)..(178): n is a, c, g, or t
  misc_feature (210)..(210): n is a, c, g, or t
  misc_feature (222)..(222): n is a, c, g, or t
  misc_feature (286)..(301): n is a, c, g, or t
  misc_feature (334)..(334): n is a, c, g, or t
  misc_feature (339)..(342): n is a, c, g, or t
  misc_feature (346)..(346): n is a, c, g, or t
  misc_feature (348)..(352): n is a, c, g, or t
  misc_feature (355)..(357): n is a, c, g, or t
  misc_feature (363)..(365): n is a, c, g, or t
gcaccagtttctagtccagaatacaccaaaaaaatagaaaacctctgtgctatgggttttgataggaacgcagtaatagtggccttntcttcaaaatcatgggatnnnnnnnnnnnnnnnnnnnnnnnnnnnnnnnnnnnnnnnnnnnnnnnnnnnnnnnnnnnnnnnnnnnnnnnnnaggagcatcaacacctgttatttttaggattntgcataaagttncttttaaactggcattcttgcctaatgatgttacctaggcaccattggagactgcaaaaaaaannnnnnnnnnnnnnnnaaataaagctaattaaacgtctgtgtaaatttnaaaannnnaaanannnnnaannntttttnnnaatagtgtaaaaattctttgagctaagctaaaaccatgggaaaacatgctactttagtgtttagcagtgtaacagactcgagagtttgcttcagggttctgttgactaacta

SEQ ID NO: 2231 - DNA, 477 bp, Mus musculus; identical to SEQ ID NO: 2230
  misc_feature (87)..(87): n is a, c, g, or t
  misc_feature (106)..(178): n is a, c, g, or t
  misc_feature (210)..(210): n is a, c, g, or t
  misc_feature (222)..(222): n is a, c, g, or t
  misc_feature (286)..(301): n is a, c, g, or t
  misc_feature (334)..(334): n is a, c, g, or t
  misc_feature (339)..(342): n is a, c, g, or t
  misc_feature (346)..(346): n is a, c, g, or t
  misc_feature (348)..(352): n is a, c, g, or t
  misc_feature (355)..(357): n is a, c, g, or t
  misc_feature (363)..(365): n is a, c, g, or t

SEQ ID NO: 2232 - DNA, 80 bp, Mus musculus
actaactaggataacactcgagtgtcggcccttcacattgtggtgtagaatcacagctcccttaagtctgaacacagatc

SEQ ID NO: 2233 - DNA, 80 bp, Mus musculus; identical to SEQ ID NO: 2232

SEQ ID NO: 2234 - DNA, 390 bp, Mus musculus
  misc_feature (26)..(26): n is a, c, g, or t
  misc_feature (47)..(47): n is a, c, g, or t
  misc_feature (83)..(83): n is a, c, g, or t
  misc_feature (85)..(87): n is a, c, g, or t
  misc_feature (179)..(179): n is a, c, g, or t
  misc_feature (181)..(181): n is a, c, g, or t
acgagtgagccttttaggggctcatntaaaaagagagcaagctaganaagaaaaagaaaggactgtccgtctccctctgtctncnnntcccccaaacccagcctccacccgcacaaaggggctctaaatcccaggcctcatctccccactggcagtccgtgctcaggctggctcttagncntgcggctttgatggaggaggtattgtaagctttccattttatagaaggcacacacacacacaagggagggcattagcgctattggctgtatgtgctagcttgtatatatatatatatatttaaaaaaaatctacctgcttctgactttaagcaaaaggaaagaaaactacctttttatataatgcacaactgttgatgactggctgtat

SEQ ID NO: 2235 - DNA, 390 bp, Mus musculus; identical to SEQ ID NO: 2234
  misc_feature (26)..(26): n is a, c, g, or t
  misc_feature (47)..(47): n is a, c, g, or t
  misc_feature (83)..(83): n is a, c, g, or t
  misc_feature (85)..(87): n is a, c, g, or t
  misc_feature (179)..(179): n is a, c, g, or t
  misc_feature (181)..(181): n is a, c, g, or t

SEQ ID NO: 2236 - DNA, 248 bp, Mus musculus
  misc_feature (72)..(86): n is a, c, g, or t
ctctggggatcctggcaccctggactgtggaaggaggcaaaaatgatgctatcaaaatcggagcctgccctnnnnnnnnnnnnnnncagtgccttaagcttgagaagccacaatgccgtactgactgggagtgcccgggaaagcagaggtgctgccaagatgcttgcggttccaagtgcgtgaatcctgttcccattcgcaaaccagtgtggaggaagcctgggaggtgcgtcaaaactcaggcaaga

SEQ ID NO: 2237 - DNA, 248 bp, Mus musculus; identical to SEQ ID NO: 2236
  misc_feature (72)..(86): n is a, c, g, or t

SEQ ID NO: 2238 - DNA, 189 bp, Mus musculus
  misc_feature (97)..(97): n is a, c, g, or t
  misc_feature (114)..(114): n is a, c, g, or t
  misc_feature (140)..(140): n is a, c, g, or t
catgaggctactggacggagatgatggtcccctgcgttgcccaaagggggtacctgcagcccgtgacattgtccagtttgtgcccttcagggacttnaaggacgctgccccctntgcactagctaagtgtgtcctggcanaggtgccacggcaggtggtagagtactatgccagccaaggtatcagtcc

SEQ ID NO: 2239 - DNA, 189 bp, Mus musculus; identical to SEQ ID NO: 2238
  misc_feature (97)..(97): n is a, c, g, or t
  misc_feature (114)..(114): n is a, c, g, or t
  misc_feature (140)..(140): n is a, c, g, or t

SEQ ID NO: 2240 - DNA, 98 bp, Mus musculus
gggcagaattcctgatctgaaaattctaaactggaacaggtatttattatcttagtgctcggaatttacgttcacatcttgttattagactttacagg

SEQ ID NO: 2241 - DNA, 98 bp, Mus musculus; identical to SEQ ID NO: 2240

SEQ ID NO: 2242 - DNA, 315 bp, Mus musculus
  misc_feature (75)..(75): n is a, c, g, or t
  misc_feature (113)..(113): n is a, c, g, or t
cagcaagccatctgaggcctgttgaatcaatccagtctcgaaggtatatatcgtggagtgtgcctgtgggatcgngggctctcaacttgctgttatattccgtttcatgtttnatagctgaagatggggggcctaaatgatgggtgcgtgaataacctgggaggggtttctttgtgaaacagttggaaaagaccccccgaacctccgtttgggggggaagaggcggtcttggttcccaggaggttgctctgttgttagaaacgccttggtctcggttggagagattcccccggcagcccttttagcctcggggtg

SEQ ID NO: 2243 - DNA, 336 bp, Mus musculus
  misc_feature (113)..(113): n is a, c, g, or t
  misc_feature (122)..(122): n is a, c, g, or t
  misc_feature (124)..(124): n is a, c, g, or t
  misc_feature (126)..(126): n is a, c, g, or t
  misc_feature (137)..(137): n is a, c, g, or t
  misc_feature (143)..(143): n is a, c, g, or t
  misc_feature (149)..(149): n is a, c, g, or t
  misc_feature (153)..(153): n is a, c, g, or t
  misc_feature (166)..(166): n is a, c, g, or t
  misc_feature (175)..(175): n is a, c, g, or t
  misc_feature (201)..(201): n is a, c, g, or t
  misc_feature (235)..(235): n is a, c, g, or t
  misc_feature (242)..(273): n is a, c, g, or t
ttacattcccaacaataagggacagctcatcaaagcctgcaaaacagaggctgacggccgggtagtggaggggaaccacatggtgtaccgaatctcagcacccacccaggagnagaaagatnantngatcaaatccntccagnctgctntaantgtggaccccttntatgagatnttggcagcaagaaagaagcgaatttntgtgaagaagaagcaagaacaaccctgacccctntccccannnnnnnnnnnnnnnnnnnnnnnnnnnnnnnntgggtggcaggacccctgggccctggggctgtggatcctggttccccatttggaaaatcacca

SEQ ID NO: 2244 - DNA, 336 bp, Mus musculus; identical to SEQ ID NO: 2243
  misc_feature (113)..(113): n is a, c, g, or t
  misc_feature (122)..(122): n is a, c, g, or t
  misc_feature (124)..(124): n is a, c, g, or t
  misc_feature (126)..(126): n is a, c, g, or t
  misc_feature (137)..(137): n is a, c, g, or t
  misc_feature (143)..(143): n is a, c, g, or t
  misc_feature (149)..(149): n is a, c, g, or t
  misc_feature (153)..(153): n is a, c, g, or t
  misc_feature (166)..(166): n is a, c, g, or t
  misc_feature (175)..(175): n is a, c, g, or t
  misc_feature (201)..(201): n is a, c, g, or t
  misc_feature (235)..(235): n is a, c, g, or t
  misc_feature (242)..(273): n is a, c, g, or t

SEQ ID NO: 2245 - DNA, 411 bp, Mus musculus
  misc_feature (27)..(27): n is a, c, g, or t
  misc_feature (36)..(36): n is a, c, g, or t
  misc_feature (49)..(75): n is a, c, g, or t
  misc_feature (109)..(109): n is a, c, g, or t
  misc_feature (230)..(230): n is a, c, g, or t
gtcactgcagtgcacccaggcggcgcnagcagcagncctcctagccttnnnnnnnnnnnnnnnnnnnnnnnnnnnccctccggaaggcgtgcgcctgcgcacagcgggnacagcgcctgcaggtgctctggcatccccctgcttcctggcccttcccggacatcttctctctcaagtaccgactccgctaccggcgccgaggagcctctcacttccgccaggtgggaccnattgaagccacgactttcaccctcaggaactcgaaaccccatgccaagtattgcatccaggtgtcagctcaggacctcacagattatgggaaaccaagtgactggagcctccctgggcaagtagaaagtgcaccccataagccctgaagagggactggatccttgatatcagaccctgatg

SEQ ID NO: 2246 - DNA, 411 bp, Mus musculus; identical to SEQ ID NO: 2245
  misc_feature (27)..(27): n is a, c, g, or t
  misc_feature (36)..(36): n is a, c, g, or t
  misc_feature (49)..(75): n is a, c, g, or t
  misc_feature (109)..(109): n is a, c, g, or t
  misc_feature (230)..(230): n is a, c, g, or t

SEQ ID NO: 2247 - DNA, 321 bp, Mus musculus
  misc_feature (253)..(253): n is a, c, g, or t
agataaggagcagtttgaggtcccagctctaatggcttaattccagagccagctctggatcttaatggcatctatctagaagaatacagcttctgggtccctggtgtcaggatgacagccacctcactgtggcagtgatggtggcccattcttaattgctgctaattataaatctggtgatgaactctacacccgattgttgccccaaagcatcagttaggccttgttacaaatgagtgaaaggcgagtgccnacttctctcagaaacacggggagcagagttgccttccaacctgtgcctgctcccaaaatctagatgga

SEQ ID NO: 2248 - DNA, 321 bp, Mus musculus; identical to SEQ ID NO: 2247
  misc_feature (253)..(253): n is a, c, g, or t

SEQ ID NO: 2249 - DNA, 551 bp, Mus musculus
  misc_feature (140)..(140): n is a, c, g, or t
  misc_feature (287)..(317): n is a, c, g, or t
  misc_feature (362)..(364): n is a, c, g, or t
  misc_feature (370)..(370): n is a, c, g, or t
  misc_feature (404)..(405): n is a, c, g, or t
  misc_feature (432)..(432): n is a, c, g, or t
  misc_feature (451)..(451): n is a, c, g, or t
  misc_feature (454)..(454): n is a, c, g, or t
  misc_feature (464)..(464): n is a, c, g, or t
catccaggaagtagcccacagcctgacaatacttgttaactaactgcattctagtagtcccttggttcatcatcagaggctcattttgttattacagcaacagcaatctgaatcttgaccctgtggccccgcctcagggntggagagtcctgatggggcctgttaccagggtgggcactcatgctttctcttgagctcgatttaaagactcatcaaaactcttccccctaaagttttatattgaaccttagaactgaatcacctctaattgaattgaacaagcagcnnnnnnnnnnnnnnnnnnnnnnnnnnnnnnncccaggtgttggaacagactgctgtcctgtgtgctgcagagtctnnnccttgntggcacttaggaagatccagtttctccctaactnntagcacatgtactggaccatgctgcangcactcacacaccactctngtnatggatgcancctgagacctgaggacctcttggcttctggacccatcagtgatcagaccctggaagctttgcttccatgctggactgtctgaaggga

SEQ ID NO: 2250 - DNA, 551 bp, Mus musculus; identical to SEQ ID NO: 2249
  misc_feature (140)..(140): n is a, c, g, or t
  misc_feature (287)..(317): n is a, c, g, or t
  misc_feature (362)..(364): n is a, c, g, or t
  misc_feature (370)..(370): n is a, c, g, or t
  misc_feature (404)..(405): n is a, c, g, or t
  misc_feature (432)..(432): n is a, c, g, or t
  misc_feature (451)..(451): n is a, c, g, or t
  misc_feature (454)..(454): n is a, c, g, or t
  misc_feature (464)..(464): n is a, c, g, or t

SEQ ID NO: 2251 - DNA, 340 bp, Mus musculus
  misc_feature (85)..(85): n is a, c, g, or t
  misc_feature (232)..(262): n is a, c, g, or t
  misc_feature (307)..(309): n is a, c, g, or t
  misc_feature (315)..(315): n is a, c, g, or t
agtcccttggttcatcatcagaggctcattttgttattacagcaacagcaatctgaatcttgaccctgtggccccgcctcagggntggagagtcctgatggggcctgttaccagggtgggcactcatgctttctcttgagctcgatttaaagactcatcaaaactcttccccctaaagttttatattgaaccttagaactgaatcacctctaattgaattgaacaagcagcnnnnnnnnnnnnnnnnnnnnnnnnnnnnnnncccaggtgttggaacagactgctgtcctgtgtgctgcagagtctnnnccttgntggcacttaggaagatccagtttct

SEQ ID NO: 2252 - DNA, 340 bp, Mus musculus; identical to SEQ ID NO: 2251
  misc_feature (85)..(85): n is a, c, g, or t
  misc_feature (232)..(262): n is a, c, g, or t
  misc_feature (307)..(309): n is a, c, g, or t
  misc_feature (315)..(315): n is a, c, g, or t

SEQ ID NO: 2253 - DNA, 545 bp, Mus musculus
  misc_feature (81)..(82): n is a, c, g, or t
ccaaaagtgacgtgtcccaaacatctttggtgacaacaattaattcactgacaacaccaaaacatgaagtgggaacaacanntgaaggtcccctaaggaatgaaagttccactatgaaaataacagtgccaaatactccaacttcaaatgctaattcaacgctaccaggttcccagaacaagactgagaatcagagttcaatcagaacaacggaaatatcagttactactcaactactggatgccttgccgaaaatcactgcaacatcctctgcatctctaacaactgcacacaccatgtcactgcttcaagatactgaggataggaagattgcaaccactccatcaaccaccccctcctattccagtatcattttgcctgtggttatcgcgctggttgttataacactcttggtatttactctggtgggtttgtatcgaatatgctggaagagagacccaggcactccagaaaacggaaatgatcagcctcagtccgataaagagagtgtgaagctgctcactgttaagacaatctctcatgag

SEQ ID NO: 2254 - DNA, 545 bp, Mus musculus; identical to SEQ ID NO: 2253
  misc_feature (81)..(82): n is a, c, g, or t

SEQ ID NO: 2255 - DNA, 511 bp, Mus musculus
  misc_feature (27)..(28): n is a, c, g, or t
caccaaaacatgaagtgggaacaacanntgaaggtcccctaaggaatgaaagttccactatgaaaataacagtgccaaatactccaacttcaaatgctaattcaacgctaccaggttcccagaacaagactgagaatcagagttcaatcagaacaacggaaatatcagttactactcaactactggatgccttgccgaaaatcactgcaacatcctctgcatctctaacaactgcacacaccatgtcactgcttcaagatactgaggataggaagattgcaaccactccatcaaccaccccctcctattccagtatcattttgcctgtggttatcgcgctggttgttataacactcttggtatttactctggtgggtttgtatcgaatatgctggaagagagacccaggcactccagaaaacggaaatgatcagcctcagtccgataaagagagtgtgaagctgctcactgttaagacaatctctcatgagtctggcgaacactctgcaca

SEQ ID NO: 2256 - DNA, 511 bp, Mus musculus; identical to SEQ ID NO: 2255
  misc_feature (27)..(28): n is a, c, g, or t

SEQ ID NO: 2257 - DNA, 152 bp, Mus musculus
  misc_feature (26)..(26): n is a, c, g, or t
tacagcatctttggatctctggggangcagccttcgatagggacatcctgggttctgtcagtgagcagatccagaagaattttgccaggacccactggaagcgtgcattcaatgccacatcattcctacgtcacatccgtaagctgggacaa

SEQ ID NO: 2258 - DNA, 152 bp, Mus musculus; identical to SEQ ID NO: 2257
  misc_feature (26)..(26): n is a, c, g, or t

SEQ ID NO: 2259 - DNA, 594 bp, Mus musculus
  misc_feature (29)..(29): n is a, c, g, or t
  misc_feature (35)..(35): n is a, c, g, or t
  misc_feature (37)..(37): n is a, c, g, or t
  misc_feature (42)..(42): n is a, c, g, or t
  misc_feature (46)..(67): n is a, c, g, or t
  misc_feature (112)..(112): n is a, c, g, or t
  misc_feature (117)..(117): n is a, c, g, or t
  misc_feature (133)..(133): n is a, c, g, or t
  misc_feature (169)..(169): n is a, c, g, or t
  misc_feature (171)..(171): n is a, c, g, or t
  misc_feature (178)..(178): n is a, c, g, or t
  misc_feature (180)..(180): n is a, c, g, or t
  misc_feature (188)..(188): n is a, c, g, or t
  misc_feature (202)..(218): n is a, c, g, or t
  misc_feature (354)..(354): n is a, c, g, or t
  misc_feature (395)..(395): n is a, c, g, or t
  misc_feature (400)..(401): n is a, c, g, or t
caagaacttttcaggctgcgtgggatcanggcccnangtggnccgnnnnnnnnnnnnnnnnnnnnnncggagggagcagcggcgcatacggcgactggcagaggctgacaanccccnaaggctgggacggctnaagtaccaggctcctgacattgatgtgcagctcagntntgagttntntggctcantcaggacactgaannnnnnnnnnnnnnnnntccgagacaggttcaagagcttccagaagagaaatatgattgagccccgagaacgagccaagttcaagcgcaaatacaaagtgaagctggtggagaagcgggcctaccgtgagattcagttgtagctgtgcagatntcggagccccgcccctcaataaagttctgtgaccaaaaaanaaaannaaaacttagccttcctcccttttgaaagctgccagtgtcaggcccttcccaaaccctctgactggtcaaccagtgggcgctcaggaatctagagtaggggtgaagaggatgcctaagggaaccaaccaaaagtctcaaatcagaaggggcattaagtgagaaaggctgtggggtgcagctgtccgctcatcca

SEQ ID NO: 2260 - DNA, 594 bp, Mus musculus; identical to SEQ ID NO: 2259
  misc_feature (29)..(29): n is a, c, g, or t
  misc_feature (35)..(35): n is a, c, g, or t
  misc_feature (37)..(37): n is a, c, g, or t
  misc_feature (42)..(42): n is a, c, g, or t
  misc_feature (46)..(67): n is a, c, g, or t
  misc_feature (112)..(112): n is a, c, g, or t
  misc_feature (117)..(117): n is a, c, g, or t
  misc_feature (133)..(133): n is a, c, g, or t
  misc_feature (169)..(169): n is a, c, g, or t
  misc_feature (171)..(171): n is a, c, g, or t
  misc_feature (178)..(178): n is a, c, g, or t
  misc_feature (180)..(180): n is a, c, g, or t
  misc_feature (188)..(188): n is a, c, g, or t
  misc_feature (202)..(218): n is a, c, g, or t
  misc_feature (354)..(354): n is a, c, g, or t
  misc_feature (395)..(395): n is a, c, g, or t
  misc_feature (400)..(401): n is a, c, g, or t

SEQ ID NO: 2261 - DNA, 397 bp, Mus musculus
ggaccagtgaatgtactaggactttacaccggaagaaaagagggctgccttcaatgctgcatttgttgtcattggggattgttgctgggattatatacttaaaagcctttgatggattggccaaaggccccttccacttgaacaagttaccagagagtgttacaaggttggtgagggctgcattttctggtgtggaacatggtagataaagatgttagggatggagtttcatggttagacggagtgtctggaatgttagtatttgggagcctcgatgtacagtcctgctcctgctgccctgggacctatttgattatagtacttgggtaaacggtaaaacgacttaaatttataggacagagactcctgaatgaaggtggtccctgtggccaacagc

SEQ ID NO: 2262 - DNA, 397 bp, Mus musculus; identical to SEQ ID NO: 2261

SEQ ID NO: 2263 - DNA, 533 bp, Mus musculus
  misc_feature (34)..(34): n is a, c, g, or t
  misc_feature (63)..(64): n is a, c, g, or t
  misc_feature (71)..(71): n is a, c, g, or t
  misc_feature (77)..(77): n is a, c, g, or t
  misc_feature (157)..(157): n is a, c, g, or t
  misc_feature (176)..(269): n is a, c, g, or t
  misc_feature (334)..(355): n is a, c, g, or t
  misc_feature (357)..(357): n is a, c, g, or t
  misc_feature (360)..(360): n is a, c, g, or t
  misc_feature (402)..(402): n is a, c, g, or t
  misc_feature (404)..(404): n is a, c, g, or t
  misc_feature (424)..(439): n is a, c, g, or t
  misc_feature (501)..(501): n is a, c, g, or t
tagagccacgctctgagacttccgcctcgtgcgntcccgcttcctttctgcctcctctggccnncatccgngggggnggtggctggctgcagggttctccggatctcttctgtgttcccactactcaagcaccgagtggcgttctatggcgtccgcntcggctcagcccgcggccnnnnnnnnnnnnnnnnnnnnnnnnnnnnnnnnnnnnnnnnnnnnnnnnnnnnnnnnnnnnnnnnnnnnnnnnnnnnnnnnnnnnnnnnnnnnnntgcgtgcaacgatatgggcaagatgctgcaatttgtgctgcccgtagccacacagatccaacaannnnnnnnnnnnnnnnnnnnnntnagntgcgacggggaaggtgtccttaagtttgcccgcctggtcaantnttatgaagcccaggatcccnnnnnnnnnnnnnnnntcaggcaagctgaaggccctgttcctgccacccatgacactgccgccccatgggcctgcttntggaagcagtgtggcagcctcctgagattggt

SEQ ID NO: 2264 - DNA, 533 bp, Mus musculus; identical to SEQ ID NO: 2263
  misc_feature (34)..(34): n is a, c, g, or t
  misc_feature (63)..(64): n is a, c, g, or t
  misc_feature (71)..(71): n is a, c, g, or t
  misc_feature (77)..(77): n is a, c, g, or t
  misc_feature (157)..(157): n is a, c, g, or t
  misc_feature (176)..(269): n is a, c, g, or t
  misc_feature (334)..(355): n is a, c, g, or t
  misc_feature (357)..(357): n is a, c, g, or t
  misc_feature (360)..(360): n is a, c, g, or t
  misc_feature (402)..(402): n is a, c, g, or t
  misc_feature (404)..(404): n is a, c, g, or t
  misc_feature (424)..(439): n is a, c, g, or t
  misc_feature (501)..(501): n is a, c, g, or t

SEQ ID NO: 2265 - DNA, 515 bp, Mus musculus
  misc_feature (27)..(27): n is a, c, g, or t
  misc_feature (34)..(34): n is a, c, g, or t
  misc_feature (36)..(36): n is a, c, g, or t
  misc_feature (48)..(48): n is a, c, g, or t
  misc_feature (50)..(50): n is a, c, g, or t
  misc_feature (145)..(145): n is a, c, g, or t
  misc_feature (149)..(149): n is a, c, g, or t
  misc_feature (154)..(155): n is a, c, g, or t
  misc_feature (159)..(160): n is a, c, g, or t
  misc_feature (189)..(189): n is a, c, g, or t
  misc_feature (196)..(227): n is a, c, g, or t
  misc_feature (254)..(254): n is a, c, g, or t
  misc_feature (278)..(278): n is a, c, g, or t
  misc_feature (288)..(288): n is a, c, g, or t
  misc_feature (351)..(365): n is a, c, g, or t
  misc_feature (413)..(438): n is a, c, g, or t
ccaagggcaccaaagaaagccctgttntgattcntntcaggcaccaantntggtacttggacatcgttcttttaaaatgttttatgtgtttcctgtatattaaagtagatgattttaaatgatgctttaagaagttagagcaaanctanaccgnntctnntgtgtatagaatggcatcctaggggcctntgagacnnnnnnnnnnnnnnnnnnnnnnnnnnnnnnnnctcctttatgtagcttaagctttgatntccccagagctctgcctttggccntcttcacttnttgtttgggtttagctattgcttacctgcttgtaatttccaggtccccctctcgacataaacnnnnnnnnnnnnnnnccctaaaataagattcatgatctttccctcattgcctacgcctctccnnnnnnnnnnnnnnnnnnnnnnnnnncctagctactcaagcctaagcctcggctttgggcatcatattgaacatgacgtgtctgtgaggttgtcactagggcc

SEQ ID NO: 2266 - DNA, 515 bp, Mus musculus; identical to SEQ ID NO: 2265
  misc_feature (27)..(27): n is a, c, g, or t
  misc_feature (34)..(34): n is a, c, g, or t
  misc_feature (36)..(36): n is a, c, g, or t
  misc_feature (48)..(48): n is a, c, g, or t
  misc_feature (50)..(50): n is a, c, g, or t
  misc_feature (145)..(145): n is a, c, g, or t
  misc_feature (149)..(149): n is a, c, g, or t
  misc_feature (154)..(155): n is a, c, g, or t
  misc_feature (159)..(160): n is a, c, g, or t
  misc_feature (189)..(189): n is a, c, g, or t
  misc_feature (196)..(227): n is a, c, g, or t
  misc_feature (254)..(254): n is a, c, g, or t
  misc_feature (278)..(278): n is a, c, g, or t
  misc_feature (288)..(288): n is a, c, g, or t
  misc_feature (351)..(365): n is a, c, g, or t
  misc_feature (413)..(438): n is a, c, g, or t

SEQ ID NO: 2267 - DNA, 68 bp, Mus musculus
gagtcggcttagcagctctgagtgtttgtgctcacacagctaagaaggatgatttctttcctgatcct

SEQ ID NO: 2268 - DNA, 68 bp, Mus musculus; identical to SEQ ID NO: 2267

SEQ ID NO: 2269 - DNA, 193 bp, Mus musculus
caggcactgaaatcccaactaccagagcttgttgcagaccccagataccctggctgcagtgccctgtgtacggggtcgtgttttcactgaacctccacctctgctgtctgcttctgtctgaggaggctgtgtcctctcgcttctctttttggctgcttgggatctcactgctcactttttgagccatcctctg

SEQ ID NO: 2270 - DNA, 193 bp, Mus musculus; identical to SEQ ID NO: 2269

SEQ ID NO: 2271 - DNA, 570 bp, Mus musculus
  misc_feature (26)..(41): n is a, c, g, or t
  misc_feature (53)..(62): n is a, c, g, or t
  misc_feature (67)..(67): n is a, c, g, or t
  misc_feature (71)..(71): n is a, c, g, or t
gaccagaattcacactacaaggctgnnnnnnnnnnnnnnnnagttggacgtcnnnnnnnnnncccanttanggactgagttttctatgtatatatctgccaggaagttaacacttgctgaatttctcatcttctcacagtaagcagtctagttatgggactctatccatgttcagctgtgacttccctcatatcagacagtggtgctgtgaacgttgcagtgtgaagtctgtactggctagggatggtagcccagcgtgagttcaggcatgaacatagaggccactgaaggaagagcctcctggaagcaagttggcacgttaaatcccagacagaaagtgtcccagggagccagggcctccgccagcagggagggggtgtgctcactgcaggaacgttcatttagaagatgtaccatggagcacctccctttgctctaagagaaaacccatcttaaagttcatcttgaatacagacttcgctcgagcatgttttagaataatctggatgctgtaccttgtaccttaggtagcagagaaagtaatctggcgtctttctgtaaaaccgtcta

SEQ ID NO: 2272 - DNA, 570 bp, Mus musculus; identical to SEQ ID NO: 2271
  misc_feature (26)..(41): n is a, c, g, or t
  misc_feature (53)..(62): n is a, c, g, or t
  misc_feature (67)..(67): n is a, c, g, or t
  misc_feature (71)..(71): n is a, c, g, or t

SEQ ID NO: 2273 - DNA, 173 bp, Mus musculus
  misc_feature (56)..(56): n is a, c, g, or t
gcatggtctgcaaggaaatgcacagtaaactcaatctcaggggaccccaaggtccntggactcacctagctgcaagaaccactgataaccaagagaggctttacaaagaaatttcttgtgggtcactcttccgatcttagctccagggacagatgttcccagacccaacagat

SEQ ID NO: 2274 - DNA, 173 bp, Mus musculus; identical to SEQ ID NO: 2273
  misc_feature (56)..(56): n is a, c, g, or t

SEQ ID NO: 2275 - DNA, 197 bp, Mus musculus
ttgattatgtttcctctggggcctggtaggatgctaatccctagagcagtttaccagctatgtgtgaaattgaagcaggtaccatggatgacacgggactgcccaacaacacttggaaatgattgttaacatcacaggcatggcaccgaacactgtagagatgcacagtcagttgaacttagtagcaacgctggctt

SEQ ID NO: 2276 - DNA, 197 bp, Mus musculus; identical to SEQ ID NO: 2275

SEQ ID NO: 2277 - DNA, 205 bp, Mus musculus
cgcagcagtggtgtagctcagtgatagagggattgcttagagtgtcagaggctggttcccgacgcctgcaccaagcaccacactaccccctgcactttggaagcctttgacatagccgcagcagaacagacctctacagtgacgactggattttctcactggtctcacttcacagctttgaactccaagactgattagtgtgggc

SEQ ID NO: 2278 - DNA, 205 bp, Mus musculus; identical to SEQ ID NO: 2277

SEQ ID NO: 2279 - DNA, 384 bp, Mus musculus
  misc_feature (246)..(246): n is a, c, g, or t
  misc_feature (296)..(298): n is a, c, g, or t
  misc_feature (359)..(359): n is a, c, g, or t
gtttgaacacacatcacaagcttgactcactgactcaggctttcctagagcctcctgctggcattcagggctctgggatcaagggttgaggtagatgttacacactacctcactctgatgcctcattcctgtagtaatctctggtgaagggaaagaggagctgcccttcggaggtccccttcacctgcagctatgatgcccttcccttcatccctttcctcaccatatgccttatctccattccantcccctgctatgcaaatgcccccctggcttgtcctccctgcccccccccnnnggcaaccagttcagctgggaaagcagaggcatgtagaggatgctaaagggaagggaggtcntccactacggagacccttgttgggg

SEQ ID NO: 2280 - DNA, 384 bp, Mus musculus; identical to SEQ ID NO: 2279
  misc_feature (246)..(246): n is a, c, g, or t
  misc_feature (296)..(298): n is a, c, g, or t
  misc_feature (359)..(359): n is a, c, g, or t

SEQ ID NO: 2281 - DNA, 305 bp, Mus musculus
  misc_feature (143)..(157): n is a, c, g, or t
  misc_feature (191)..(206): n is a, c, g, or t
  misc_feature (235)..(235): n is a, c, g, or t
  misc_feature (238)..(238): n is a, c, g, or t
  misc_feature (262)..(262): n is a, c, g, or t
  misc_feature (266)..(266): n is a, c, g, or t
tttcagctgtatgaaatgggctttctgaagtttcaattgtccgacttcacccatggtgtcccgtgcttgcgagtgtcgcagtaactcagtgttggcctcactgtctttgcttagctctccgtttttttctttcgacgtagtgnnnnnnnnnnnnnnnttttctatgaattccaatttgccttaactctttnnnnnnnnnnnnnnnntcagtaaagttagttcaacctaatgatgnagnatgctttgaccaaatgggctggtntagngcaccttgtaagcagcagcctagggcttttaaaaggtag

SEQ ID NO: 2282 - DNA, 305 bp, Mus musculus; identical to SEQ ID NO: 2281
  misc_feature (143)..(157): n is a, c, g, or t
  misc_feature (191)..(206): n is a, c, g, or t
  misc_feature (235)..(235): n is a, c, g, or t
  misc_feature (238)..(238): n is a, c, g, or t
  misc_feature (262)..(262): n is a, c, g, or t
  misc_feature (266)..(266): n is a, c, g, or t

SEQ ID NO: 2283 - DNA, 518 bp, Mus musculus
  misc_feature (51)..(69): n is a, c, g, or t
  misc_feature (381)..(381): n is a, c, g, or t
  misc_feature (393)..(393): n is a, c, g, or t
  misc_feature (413)..(413): n is a, c, g, or t
  misc_feature (435)..(435): n is a, c, g, or t
cttggacatttttgccataattgtaaaagggtagttgaattaaatagcgtnnnnnnnnnnnnnnnnnnnacaggttataaacttaagtggagtttaccggcagcatcaaatgtttcagctttaaaaataaaagtaggttacaagttacatgtttagttttagaaaatttgtgcaatatgttcataacgatggctgtggttgccacaaagtgcctcgtttacctttaaatactgttaatgtgtcgtgcatgcagacggaaggggtggatctgtgcactaaacggggggcttttactctagtattcggcagagttgccttctacctgccagctcaaaagttcgatctgttttcatatagaatatatatactaaaaccatccantctgtaaaacanccttaccccgattcagcctnttcagatactcttgtgctgtgnagcagtggctctgtgtgtaaatgctatgcactgaggatacacaaatatgacgtgtacaggataatgcctcataccaatcagat

SEQ ID NO: 2284 - DNA, 518 bp, Mus musculus; identical to SEQ ID NO: 2283
  misc_feature (51)..(69): n is a, c, g, or t
  misc_feature (381)..(381): n is a, c, g, or t
  misc_feature (393)..(393): n is a, c, g, or t
  misc_feature (413)..(413): n is a, c, g, or t
  misc_feature (435)..(435): n is a, c, g, or t

SEQ ID NO: 2285 - DNA, 305 bp, Mus musculus
  misc_feature (87)..(88): n is a, c, g, or t
  misc_feature (132)..(132): n is a, c, g, or t
ggagccttcctgcagcatgtggtactggcggcctgtgccctcctctgtatcctcagcatcatgctgttgccagagaccaagcgcaannttctgccagaggtactccgggatggggaactgtgccgccggccnttccctgctgaggcagccacctcctaaccgctgtgaccatgtcccgctgctagccactcctaaccctgccctctaagcagcctttgagcctagtgggaggccagccatccagaaaagtagcagagggctagaaagatagacaggaaggcaaggctaccccatacaaaaggctc

SEQ ID NO: 2286 - DNA, 305 bp, Mus musculus; identical to SEQ ID NO: 2285
  misc_feature (87)..(88): n is a, c, g, or t
  misc_feature (132)..(132): n is a, c, g, or t

SEQ ID NO: 2287 - DNA, 228 bp, Mus musculus
  misc_feature (26)..(26): n is a, c, g, or t
ccttgagctgccagaggaggccttgncgttgctaggattgcgtcagttttcctgtttgcactatttctttttgtaacagtgaccctgtcttaagtctttcagatctctttgctttgaaacttcgtcgattccattgtgataagcgcacaaacagcactgttggtaaccggtactactttattaatgattttctgttacactgtacagtagtcctgtggcaccctatcc

SEQ ID NO: 2288 - DNA, 228 bp, Mus musculus; identical to SEQ ID NO: 2287
  misc_feature (26)..(26): n is a, c, g, or t

SEQ ID NO: 2289 - DNA, 491 bp, Mus musculus
  misc_feature (75)..(75): n is a, c, g, or t
  misc_feature (103)..(119): n is a, c, g, or t
  misc_feature (228)..(228): n is a, c, g, or t
  misc_feature (231)..(233): n is a, c, g, or t
  misc_feature (238)..(238): n is a, c, g, or t
  misc_feature (241)..(241): n is a, c, g, or t
  misc_feature (245)..(245): n is a, c, g, or t
  misc_feature (247)..(247): n is a, c, g, or t
  misc_feature (250)..(250): n is a, c, g, or t
  misc_feature (257)..(259): n is a, c, g, or t
  misc_feature (262)..(262): n is a, c, g, or t
  misc_feature (265)..(266): n is a, c, g, or t
  misc_feature (268)..(269): n is a, c, g, or t
  misc_feature (273)..(273): n is a, c, g, or t
  misc_feature (279)..(279): n is a, c, g, or t
  misc_feature (281)..(281): n is a, c, g, or t
  misc_feature (284)..(284): n is a, c, g, or t
  misc_feature (303)..(332): n is a, c, g, or t
  misc_feature (357)..(357): n is a, c, g, or t
  misc_feature (360)..(360): n is a, c, g, or t
  misc_feature (371)..(371): n is a, c, g, or t
  misc_feature (387)..(387): n is a, c, g, or t
  misc_feature (389)..(389): n is a, c, g, or t
  misc_feature (392)..(392): n is a, c, g, or t
  misc_feature (398)..(398): n is a, c, g, or t
  misc_feature (425)..(425): n is a, c, g, or t
  misc_feature (427)..(427): n is a, c, g, or t
gacagccaggtccttaccatcaatcctgccctacctgtggaggatgctgcagaggactatgccaggaaactgagncaggccttgcaaggagacgctgtccctnnnnnnnnnnnnnnnnncctgggagtgggccctgacggccatacctgttcgctcttccctgaccatcccctcctacaggagcgggagaagatcgtggctcccatcagtgactccccaaagccaccnccnnnagagngtnaccntnacncttcctnnnctnaanncnncccnaaagtntnatntttgtggccacgggggaannnnnnnnnnnnnnnnnnnnnnnnnnnnnngaggacaaggagggcacgttgcccnccnccttggtgcanccgcgcacgggcgccntntgntggttnctggacgaggcagctgcccggctgctntntgtgcccttcgagaagcattccacattgtagggggtgcgccatgcacgccgtgggcacttcggg

SEQ ID NO: 2290 - DNA, 491 bp, Mus musculus; identical to SEQ ID NO: 2289
  misc_feature (75)..(75): n is a, c, g, or t
  misc_feature (103)..(119): n is a, c, g, or t
  misc_feature (228)..(228): n is a, c, g, or t
  misc_feature (231)..(233): n is a, c, g, or t
  misc_feature (238)..(238): n is a, c, g, or t
  misc_feature (241)..(241): n is a, c, g, or t
  misc_feature (245)..(245): n is a, c, g, or t
  misc_feature (247)..(247): n is a, c, g, or t
  misc_feature (250)..(250): n is a, c, g, or t
  misc_feature (257)..(259): n is a, c, g, or t
  misc_feature (262)..(262): n is a, c, g, or t
  misc_feature (265)..(266): n is a, c, g, or t
  misc_feature (268)..(269): n is a, c, g, or t
  misc_feature (273)..(273): n is a, c, g, or t
  misc_feature (279)..(279): n is a, c, g, or t
  misc_feature (281)..(281): n is a, c, g, or t
  misc_feature (284)..(284): n is a, c, g, or t
  misc_feature (303)..(332): n is a, c, g, or t
  misc_feature (357)..(357): n is a, c, g, or t
  misc_feature (360)..(360): n is a, c, g, or t
  misc_feature (371)..(371): n is a, c, g, or t
  misc_feature (387)..(387): n is a, c, g, or t
  misc_feature (389)..(389): n is a, c, g, or t
  misc_feature (392)..(392): n is a, c, g, or t
  misc_feature (398)..(398): n is a, c, g, or t
  misc_feature (425)..(425): n is a, c, g, or t
  misc_feature (427)..(427): n is a, c, g, or t

SEQ ID NO: 2291 - DNA, 590 bp, Mus musculus
tcggcagctcaatctctctgagacccaggtgaaggtctggttccagaatcggcggactaagcagaagaaggaccagggcaaggactcggagctgcgctcggtggtgtcggagaccgccgccacgtgcagcgtgctgcggctcttggagcaaggccgcctgttgtcgcctcccgggctgcccgccttgctgccgccctgtgccactggcgctctaggctcggcgttgcgcgggcccagcctcccggccctgggtgcaggcgctgccgcgggctccgccgctgccgccgccgctgccgccgccgccactgccccgggtcccgcaggcgcggcgtcccagcaccagccggccgtgggcggcgctcccggcccagggcctgcagggccgggaggactgcacgcgggagcaccgactgccagccacggtctcttcagcctgccggtgccgtcgctgctaggctctgtcgccagccgcctgtcctccgccccgttgacgatggctggttcgctagccgggaatttgcaagaactctcagcccgttacctgagctcctcggccttcgagccttactcccggaccaacaataaagaag

SEQ ID NO: 2292 - DNA, 590 bp, Mus musculus; identical to SEQ ID NO: 2291

SEQ ID NO: 2293 - DNA, 183 bp, Mus musculus
acccaggtgttcagagggtgcgtctgcctggaatcaaagggtctgttttgcagagttactgcatggttgttaatgcttagaatggcaacaaggtagaattattaatcaaaggcctatcgttaatatctgaatatccttccttcagggtttgataggtttaatagactgagtcagatgactctg

SEQ ID NO: 2294 - DNA, 183 bp, Mus musculus; identical to SEQ ID NO: 2293

SEQ ID NO: 2295 - DNA, 425 bp, Mus musculus
  misc_feature (58)..(58): n is a, c, g, or t
  misc_feature (60)..(60): n is a, c, g, or t
  misc_feature (70)..(70): n is a, c, g, or t
  misc_feature (75)..(75): n is a, c, g, or t
  misc_feature (186)..(186): n is a, c, g, or t
  misc_feature (188)..(188): n is a, c, g, or t
cagttactgaactttgtaaatacgtaaattttttatttaggtgtggatgcattttttntntgtttactgntcctntcagctttattcaataaacttgcattttgagggttgcattgacaattttaccttaaaatgtatcatgatgaaaagacgcagacctttggactcgagtgggaagataatcantntggaaagggctccacagactgtgctggaaggtggctgcctcagctggccgaggtgttgatgggatgaactagaaataaacttttacagtgtctacagagttggtatcatggtcccctcccttctctcttgctcggagaggattctgttacatatacattgagtggcacttggtgggccggtcctgaggagtgagtctagtcttcaccaatgctggccaggcactctaatgtcaccga

SEQ ID NO: 2296 - DNA, 425 bp, Mus musculus; identical to SEQ ID NO: 2295
  misc_feature (58)..(58): n is a, c, g, or t
  misc_feature (60)..(60): n is a, c, g, or t
  misc_feature (70)..(70): n is a, c, g, or t
  misc_feature (75)..(75): n is a, c, g, or t
  misc_feature (186)..(186): n is a, c, g, or t
  misc_feature (188)..(188): n is a, c, g, or t

SEQ ID NO: 2297 - DNA, 295 bp, Mus musculus
  misc_feature (164)..(164): n is a, c, g, or t
  misc_feature (168)..(171): n is a, c, g, or t
  misc_feature (173)..(174): n is a, c, g, or t
  misc_feature (201)..(230): n is a, c, g, or t
  misc_feature (234)..(235): n is a, c, g, or t
  misc_feature (240)..(240): n is a, c, g, or t
  misc_feature (249)..(249): n is a, c, g, or t
  misc_feature (260)..(260): n is a, c, g, or t
tctgacagcaggaagtttgcttctgaaccaactagaagcctaacagaagagcagcaacagagaattgagagaaataaacagctggccttggaaagaaggcaggcaaagctactgagtaatagccagtccctagaaaatgatgtgacagttgaagagaacagtantggnnnngnncaagaagagtcaaatggattaaacatnnnnnnnnnnnnnnnnnnnnnnnnnnnnnntttnnccagnacacatgangaggaacagtncaaagcagaggagacacaactggaccatactaact

SEQ ID NO: 2298 - DNA, 295 bp, Mus musculus; identical to SEQ ID NO: 2297
  misc_feature (164)..(164): n is a, c, g, or t
  misc_feature (168)..(171): n is a, c, g, or t
  misc_feature (173)..(174): n is a, c, g, or t
  misc_feature (201)..(230): n is a, c, g, or t
  misc_feature (234)..(235): n is a, c, g, or t
  misc_feature (240)..(240): n is a, c, g, or t
  misc_feature (249)..(249): n is a, c, g, or t
  misc_feature (260)..(260): n is a, c, g, or t

SEQ ID NO: 2299 - DNA, 381 bp, Mus musculus
  misc_feature (55)..(78): n is a, c, g, or t
  misc_feature (83)..(122): n is a, c, g, or t
  misc_feature (356)..(356): n is a, c, g, or t
gtacctgaccacctttggcctctatcaggggtgggaatatgactctcactggtgnnnnnnnnnnnnnnnnnnnnnnnngtggnnnnnnnnnnnnnnnnnnnnnnnnnnnnnnnnnnnnnnnntgctaccacatgcttcaccccccattgtcaccccacatcctgggcatgggagtggcccctttaaccctaccctgccaagaaaaccaaacagggaaaacaaagatgtaggactattgacctagctctttaacttgtagccagctgtcgtcgttggtctggcaagagggctcatggaggaagtctgtctgcctcccaggatagcagatgaggtgccttcccagtggaccctgctgntgctcgcttgctgcagagaattgtt

SEQ ID NO: 2300 - DNA, 381 bp, Mus musculus; identical to SEQ ID NO: 2299
  misc_feature (55)..(78): n is a, c, g, or t
  misc_feature (83)..(122): n is a, c, g, or t
  misc_feature (356)..(356): n is a, c, g, or t

SEQ ID NO: 2301 - DNA, 351 bp, Mus musculus
  misc_feature (64)..(78): n is a, c, g, or t
  misc_feature (233)..(247): n is a, c, g, or t
gaaactgttgccttaatgatatcctctaccttgtataacttggtgccattttgaaacttgaatnnnnnnnnnnnnnnnagaattggagatggaataaatagtttatagactcgatacctttggccaaattgccacctactggttgactgaaggccctgttacactcaaaatactccttcccgaagaggtgatggctgactctctggaggccccttgcctactttcagccagcnnnnnnnnnnnnnnngatctttaattgctagccaggaaaactcaagagatgtctctggtgccatccatatactcctggctgtgcatgggatgtgggtgtgaagcacacatctgtctatc

SEQ ID NO: 2302 - DNA, 351 bp, Mus musculus; identical to SEQ ID NO: 2301
  misc_feature (64)..(78): n is a, c, g, or t
  misc_feature (233)..(247): n is a, c, g, or t

SEQ ID NO: 2303 - DNA, 212 bp, Mus musculus
atagtcccgaaatcagtctgaccagttagcgatggacaggatgtcaggctgtcataacccagagtgcaatcagagctcccatttctctcaccttttcagtctcatcagcaagtgcctccctgtctgctgcttcagaactatgggtcaatcctccaggtcccctggctgtgtgccccctacccatccctgcatgcacactttgggacttttct

SEQ ID NO: 2304 - DNA, 212 bp, Mus musculus; identical to SEQ ID NO: 2303

SEQ ID NO: 2305 - DNA, 235 bp, Mus musculus
  misc_feature (112)..(112): n is a, c, g, or t
  misc_feature (121)..(121): n is a, c, g, or t
  misc_feature (127)..(128): n is a, c, g, or t
  misc_feature (131)..(131): n is a, c, g, or t
  misc_feature (151)..(151): n is a, c, g, or t
  misc_feature (169)..(169): n is a, c, g, or t
  misc_feature (172)..(172): n is a, c, g, or t
  misc_feature (210)..(210): n is a, c, g, or t
gattcctaacagaggcattgacttactgaaaaaagataaatcccggaaaagatcctattctccagatggaaaagaatctccaagtgataagaagtccaaaactgatgctcanaagactganagtccnnctnagggtaaagaacaagaaganaagtcgggtgaggatggnganaaggacaccaaggatgaccagacagaacaggagcccancatgcttcttgaatctgaagatgaa

SEQ ID NO: 2306 - DNA, 235 bp, Mus musculus; identical to SEQ ID NO: 2305
  misc_feature (112)..(112): n is a, c, g, or t
  misc_feature (121)..(121): n is a, c, g, or t
  misc_feature (127)..(128): n is a, c, g, or t
  misc_feature (131)..(131): n is a, c, g, or t
  misc_feature (151)..(151): n is a, c, g, or t
  misc_feature (169)..(169): n is a, c, g, or t
  misc_feature (172)..(172): n is a, c, g, or t
  misc_feature (210)..(210): n is a, c, g, or t

SEQ ID NO: 2307 - DNA, 201 bp, Mus musculus
ctactgcctaaagaattttggctctattaaaatgtaagtgtgtggctggaatatgtgcatgtatgtggctgacatatgtgcatgtgtgtgcagacactgtacctgtgattctggaggacaccagatgtcccatcgctttcttccatattcctgagacagggtccctcactggactagagtgaggccatttctgctcttccc

SEQ ID NO: 2308 - DNA, 201 bp, Mus musculus; identical to SEQ ID NO: 2307

SEQ ID NO: 2309 - DNA, 194 bp, Mus musculus
gcttaggacccctgctagacgttctagctgatagtcgccatctctggagcccttttgggttgcgctctctttcagcctctagcctcttttataaacagcgtaacactgagcacgatccaccctactggcgaggtgccgtgtggctgaatattaactacctagctttgggggcactacatcactatgggcatgtg

SEQ ID NO: 2310 - DNA, 194 bp, Mus musculus; identical to SEQ ID NO: 2309

SEQ ID NO: 2311 - DNA, 211 bp, Mus musculus
ccaggctgaacctgtggcgctatggagacttccgcgctgatgacgctgatgagtttggctacagtcgctaaggagaacttgcctggcccccagcaccgctgatgccagaccttctcccgctgccaggaagctgttgtcgactccagacctggttgagggagtatagattgggtctagcttgcttcagtgtacagaaacctcctctgtcgtg

SEQ ID NO: 2312 - DNA, 211 bp, Mus musculus; identical to SEQ ID NO: 2311

SEQ ID NO: 2313 - DNA, 275 bp, Mus musculus
  misc_feature (28)..(28): n is a, c, g, or t
  misc_feature (43)..(43): n is a, c, g, or t
  misc_feature (49)..(49): n is a, c, g, or t
  misc_feature (52)..(52): n is a, c, g, or t
  misc_feature (73)..(73): n is a, c, g, or t
  misc_feature (139)..(139): n is a, c, g, or t
  misc_feature (161)..(161): n is a, c, g, or t
  misc_feature (206)..(211): n is a, c, g, or t
  misc_feature (233)..(233): n is a, c, g, or t
  misc_feature (235)..(235): n is a, c, g, or t
  misc_feature (238)..(238): n is a, c, g, or t
ctaccattgcatgaaacattggggtttnttcaaaatgtgtgtntcatanttnttttgggagggggttgttttnttcttttatgaaactcctactggagctcaatttgtaatttagaaacatttaattttgttaatcctntctgggacatttaggtaacatntaaagcattattgctttagaatgttcaaataaaatttcctgaccnnnnnnaaaaaaaaaaaaaaaaaaaaananaanttgaagatacctgctcagaaggccatattatagaatg

SEQ ID NO: 2314 - DNA, 275 bp, Mus musculus; identical to SEQ ID NO: 2313
  misc_feature (28)..(28): n is a, c, g, or t
  misc_feature (43)..(43): n is a, c, g, or t
  misc_feature (49)..(49): n is a, c, g, or t
  misc_feature (52)..(52): n is a, c, g, or t
  misc_feature (73)..(73): n is a, c, g, or t
  misc_feature (139)..(139): n is a, c, g, or t
  misc_feature (161)..(161): n is a, c, g, or t
  misc_feature (206)..(211): n is a, c, g, or t
  misc_feature (233)..(233): n is a, c, g, or t
  misc_feature (235)..(235): n is a, c, g, or t
  misc_feature (238)..(238): n is a, c, g, or t

SEQ ID NO: 2315 - DNA, 286 bp, Mus musculus
  misc_feature (162)..(221): n is a, c, g, or t
  misc_feature (241)..(241): n is a, c, g, or t
  misc_feature (246)..(246): n is a, c, g, or t
  misc_feature (248)..(248): n is a, c, g, or t
  misc_feature (261)..(261): n is a, c, g, or t
tgtttttattaaacatttggagatttagataatttacattttaactgaatgtctaaagtgattatcttcccctccctcccccaagttaatcttccatctttgtttttgggtttcaatgaaggctttacataagaaattattaaacaaaacaaggggggcaannnnnnnnnnnnnnnnnnnnnnnnnnnnnnnnnnnnnnnnnnnnnnnnnnnnnnnnnnnnacagactgactgggggactntattncnatgatgattggtntagaaacgtatgggtctgggtggcc

SEQ ID NO: 2316 - DNA, 286 bp, Mus musculus; identical to SEQ ID NO: 2315
  misc_feature (162)..(221): n is a, c, g, or t
  misc_feature (241)..(241): n is a, c, g, or t
  misc_feature (246)..(246): n is a, c, g, or t
  misc_feature (248)..(248): n is a, c, g, or t
  misc_feature (261)..(261): n is a, c, g, or t

SEQ ID NO: 2317 - DNA, 401 bp, Mus musculus
  misc_feature (101)..(101): n is a, c, g, or t
  misc_feature (109)..(109): n is a, c, g, or t
  misc_feature (249)..(249): n is a, c, g, or t
  misc_feature (311)..(333): n is a, c, g, or t
cccaccagcaggagcctggagttagagggtgggatgagtctgccaagcacaattgtcctctgagtggaaccaaagaaatgaagagccgggccgccctggcntggcgccntgggaacacaggggcaggtgggtatagaagtcaccggctgtgagctgcaggccctgggcagtggatagaacccatgccttcctacacatctgggctactgtgaatgatggaagcgggagggagagccacctggtactttngtccctgcctcctcttccgttctggatctttcccctctgtccaggggcgtgtgatgtttttnnnnnnnnnnnnnnnnnnnnnnncgtgctggctgccctcagccctgagtctgggagaggctttggtgcctcgggtcagacttgggtgctcc

SEQ ID NO: 2318 - DNA, 401 bp, Mus musculus; identical to SEQ ID NO: 2317
  misc_feature (101)..(101): n is a, c, g, or t
  misc_feature (109)..(109): n is a, c, g, or t
  misc_feature (249)..(249): n is a, c, g, or t
  misc_feature (311)..(333): n is a, c, g, or t

SEQ ID NO: 2319 - DNA, 311 bp, Mus musculus
  misc_feature (30)..(30): n is a, c, g, or t
  misc_feature (32)..(32): n is a, c, g, or t
  misc_feature (34)..(34): n is a, c, g, or t
  misc_feature (40)..(40): n is a, c, g, or t
  misc_feature (103)..(103): n is a, c, g, or t
  misc_feature (155)..(155): n is a, c, g, or t
  misc_feature (191)..(191): n is a, c, g, or t
  misc_feature (205)..(231): n is a, c, g, or t
acatggatcctaagtagaatcagatatttntntntttttntaaaaaaataaaataaataaatttgggtgtttttttttaatttgcttttatcagatatttatntctttttctaaaaaaaataaaataaataaatttgggtgtttttttttttttnaatttgcttttaaacaacctcgactatgcaaacacngaaaaaaaaaaaannnnnnnnnnnnnnnnnnnnnnnnnnntttaacattcttgtgtcaacatttggtactaaactcttactcttacctcatctcaagtgggttatccttccttctgtcct

SEQ ID NO: 2320 - DNA, 311 bp, Mus musculus; identical to SEQ ID NO: 2319
  misc_feature (30)..(30): n is a, c, g, or t
  misc_feature (32)..(32): n is a, c, g, or t
  misc_feature (34)..(34): n is a, c, g, or t
  misc_feature (40)..(40): n is a, c, g, or t
  misc_feature (103)..(103): n is a, c, g, or t
  misc_feature (155)..(155): n is a, c, g, or t
  misc_feature (191)..(191): n is a, c, g, or t
  misc_feature (205)..(231): n is a, c, g, or t

SEQ ID NO: 2321 - DNA, 271 bp, Mus musculus
  misc_feature (36)..(36): n is a, c, g, or t
  misc_feature (39)..(110): n is a, c, g, or t
  misc_feature (114)..(115): n is a, c, g, or t
  misc_feature (117)..(118): n is a, c, g, or t
  misc_feature (121)..(122): n is a, c, g, or t
  misc_feature (136)..(136): n is a, c, g, or t
  misc_feature (139)..(139): n is a, c, g, or t
  misc_feature (145)..(145): n is a, c, g, or t
  misc_feature (161)..(161): n is a, c, g, or t
  misc_feature (229)..(230): n is a, c, g, or t
gtgtcagcggttgaaggtacacagtgaaggtatccntgnnnnnnnnnnnnnnnnnnnnnnnnnnnnnnnnnnnnnnnnnnnnnnnnnnnnnnnnnnnnnnnnnnnnnnnnattnnannccnntcatgttctccctnacntggganatggcctgtcgagtcntcttgcctccagggaaggaacttgccatgcctggagaggacttgaagcttagtctaatcttgcggcannccatgatcttagagaaaggccaacgtttcaccttgagggat

SEQ ID NO: 2322 - DNA, 271 bp, Mus musculus; identical to SEQ ID NO: 2321
  misc_feature (36)..(36): n is a, c, g, or t
  misc_feature (39)..(110): n is a, c, g, or t
  misc_feature (114)..(115): n is a, c, g, or t
  misc_feature (117)..(118): n is a, c, g, or t
  misc_feature (121)..(122): n is a, c, g, or t
  misc_feature (136)..(136): n is a, c, g, or t
  misc_feature (139)..(139): n is a, c, g, or t
  misc_feature (145)..(145): n is a, c, g, or t
  misc_feature (161)..(161): n is a, c, g, or t
  misc_feature (229)..(230): n is a, c, g, or t

SEQ ID NO: 2323 - DNA, 426 bp, Mus musculus
  misc_feature (116)..(116): n is a, c, g, or t
  misc_feature (124)..(140): n is a, c, g, or t
  misc_feature (166)..(167): n is a, c, g, or t
  misc_feature (180)..(188): n is a, c, g, or t
  misc_feature (190)..(281): n is a, c, g, or t
  misc_feature (362)..(362): n is a, c, g, or t
taatcaactggacctgcctgcctatgagagctttgagaagctccgccacatgctactattggccatccaggaatgctctgaaggctttgggctggcctaataaataaggccctgcntacttctnnnnnnnnnnnnnnnnnttgttggacctggggaggggggtggnnttaaaagatccannnnnnnnntnnnnnnnnnnnnnnnnnnnnnnnnnnnnnnnnnnnnnnnnnnnnnnnnnnnnnnnnnnnnnnnnnnnnnnnnnnnnnnnnnnnnnnnnnnnntcttttgtctcccctttcctcgcctctcccttttccatgccgtccatgatccccaccccatgtgttaagaaggcagtagcntttacagggacctgtttgtcccaaatgaacagtgtgctcctcagattctgtgttcagaaggatt

SEQ ID NO: 2324 - DNA, 426 bp, Mus musculus; identical to SEQ ID NO: 2323
  misc_feature (116)..(116): n is a, c, g, or t
  misc_feature (124)..(140): n is a, c, g, or t
  misc_feature (166)..(167): n is a, c, g, or t
  misc_feature (180)..(188): n is a, c, g, or t
  misc_feature (190)..(281): n is a, c, g, or t
  misc_feature (362)..(362): n is a, c, g, or t

SEQ ID NO: 2325 - DNA, 513 bp, Mus musculus
atgcatgtgtaaccatatgatcagtactgcagttcctgtagtctaacccatctgcatagtcagttggaaaaagaaatgtgctgttgtagtaacgtagaacaaaagctgctaaaacaatgtagagtggaccaggacccgagctgagcagcaggagcctctgttccctgcagcctgtggggcgggtccagccttctgaggtgcccttcaaagccatcatctgagagaagaaacggttcaggcgacatgagcaagtttctgggaaactttgtttgagagcatgctaaggtttatttaaaaccccaggaattgctctttccaggtgaaaaattctttttttgacctgaaggcagaggaaagagttccctgctaatgattccattcagctgatgaagtacttgattattagagagcagtgccactaagcagctttaagttgtccgtaatcattgtaaacatcagtgcagtaccttcaatatggtaaagatgttgtcttcagatgaatggctcatattt

SEQ ID NO: 2326 - DNA, 513 bp, Mus musculus; identical to SEQ ID NO: 2325

SEQ ID NO: 2327 - DNA, 234 bp, Mus musculus
ttctgagcaagcacctgcctgactcctcccccaagatggtagccctgacttgtagcccctccccacaactcgtacccatgcagtgcctgtcactgtcacttttctccctcctcattccctgtggtactgatggcagtgaacctgagaggcacctggagaagtgagtgcaggcttggtgttttgattaggggaggggtcagtcaagaagatgagctgaggtgtgaccatgctcct

SEQ ID NO: 2328 - DNA, 234 bp, Mus musculus; identical to SEQ ID NO: 2327

SEQ ID NO: 2329 - DNA, 408 bp, Mus musculus
  misc_feature (61)..(61): n is a, c, g, or t
  misc_feature (66)..(66): n is a, c, g, or t
  misc_feature (252)..(252): n is a, c, g, or t
  misc_feature (254)..(254): n is a, c, g, or t
  misc_feature (267)..(267): n is a, c, g, or t
  misc_feature (304)..(304): n is a, c, g, or t
  misc_feature (306)..(306): n is a, c, g, or t
  misc_feature (316)..(316): n is a, c, g, or t
  misc_feature (327)..(327): n is a, c, g, or t
  misc_feature (331)..(331): n is a, c, g, or t
  misc_feature (333)..(333): n is a, c, g, or t
  misc_feature (345)..(345): n is a, c, g, or t
  misc_feature (347)..(347): n is a, c, g, or t
ccaatggggcctatgggagccccacctcctcaggggtacccctacccaccacctcaggggnacccntatcaaggatacccacagtacggctggcagggtggacctcaggagcctcctaagaccacagtgtatgtggtggaagaccaaagaagagacgacctgggcccatccacctgcctcacagcctgctggactgctctgtgttgctgctgcctctgggacatgctcacctgatcacctgatgagcccagntnttccgcttggccnctctgtgccacctccgataagtgtgcctggccccatntnttctgattgntataaagtggntagntntgcgcagacacntntactttctgtcctatggagttttagattagtgagggttactgctatttagttcagtgactt

SEQ ID NO: 2330 - DNA, 408 bp, Mus musculus; identical to SEQ ID NO: 2329
  misc_feature (61)..(61): n is a, c, g, or t
  misc_feature (66)..(66): n is a, c, g, or t
  misc_feature (252)..(252): n is a, c, g, or t
  misc_feature (254)..(254): n is a, c, g, or t
  misc_feature (267)..(267): n is a, c, g, or t
  misc_feature (304)..(304): n is a, c, g, or t
  misc_feature (306)..(306): n is a, c, g, or t
  misc_feature (316)..(316): n is a, c, g, or t
  misc_feature (327)..(327): n is a, c, g, or t
  misc_feature (331)..(331): n is a, c, g, or t
  misc_feature (333)..(333): n is a, c, g, or t
  misc_feature (345)..(345): n is a, c, g, or t
  misc_feature (347)..(347): n is a, c, g, or t

SEQ ID NO: 2331 - DNA, 505 bp, Mus musculus
  misc_feature (156)..(156): n is a, c, g, or t
  misc_feature (158)..(158): n is a, c, g, or t
  misc_feature (160)..(164): n is a, c, g, or t
  misc_feature (166)..(171): n is a, c, g, or t
  misc_feature (177)..(179): n is a, c, g, or t
  misc_feature (181)..(183): n is a, c, g, or t
  misc_feature (185)..(185): n is a, c, g, or t
  misc_feature (187)..(193): n is a, c, g, or t
  misc_feature (302)..(302): n is a, c, g, or t
  misc_feature (390)..(390): n is a, c, g, or t
  misc_feature (392)..(393): n is a, c, g, or t
  misc_feature (395)..(395): n is a, c, g, or t
  misc_feature (427)..(443): n is a, c, g, or t
tgctagtctgttaatcataatgttcttagaaaagaattctcattcatcttcccatagtgaaattctctagcactgtatttagattctggatttttataattcatgcttaatgtattagacatttttagcccataattaaaacattgttgcttttananannnnnannnnnntgcatnnnannnanannnnnnnaaagttatttataaattaaccaattacactcagctgtaatatgaaatggcagtagtcttttgaatgataaagctggtttttttgtttttggttgatttagagacgatcncggctgtcattagcttgaaggcatttttgggggtggggttagggtatctgaaggctttcctatcatggtttgggaagtagaagcagangnngnagggttctcttcagaggcaggtcatggactcnnnnnnnnnnnnnnnnngttcagggccctttaaggagcctgtccctttctaaggccagacttgccgtggagcggtctct

SEQ ID NO: 2332 - DNA, 505 bp, Mus musculus; identical to SEQ ID NO: 2331
  misc_feature (156)..(156): n is a, c, g, or t
  misc_feature (158)..(158): n is a, c, g, or t
  misc_feature (160)..(164): n is a, c, g, or t
  misc_feature (166)..(171): n is a, c, g, or t
  misc_feature (177)..(179): n is a, c, g, or t
  misc_feature (181)..(183): n is a, c, g, or t
  misc_feature (185)..(185): n is a, c, g, or t
  misc_feature (187)..(193): n is a, c, g, or t
  misc_feature (302)..(302): n is a, c, g, or t
  misc_feature (390)..(390): n is a, c, g, or t
  misc_feature (392)..(393): n is a, c, g, or t
  misc_feature (395)..(395): n is a, c, g, or t
  misc_feature (427)..(443): n is a, c, g, or t

SEQ ID NO: 2333 - DNA, 376 bp, Mus musculus
  misc_feature (61)..(75): n is a, c, g, or t
  misc_feature (325)..(325): n is a, c, g, or t
ggagtcagaccttcacaggaaactggctgtccatgctctctgggagggaggagtggtgtcnnnnnnnnnnnnnnnatgttctggcatgttccctgaaggacagagcatcttattatatatttggcttcaaaatgagatggtagttccattttctttttttaaaaacaattaatctttccaatccctaacaactgtgactgtatttagcacaagagaaaagctgagaacgtgggttttgcctccttcagaaatatgtctggctcatcaggacattttttaaaaacttcaaaatatttttaagatattttaaacttttgtaaaaaanaaaaaaaaaaaaccctcgtgccgaattcggcacgaggcttcccgcactgtg

SEQ ID NO: 2334 - DNA, 376 bp, Mus musculus; identical to SEQ ID NO: 2333
  misc_feature (61)..(75): n is a, c, g, or t
  misc_feature (325)..(325): n is a, c, g, or t

SEQ ID NO: 2335 - DNA, 315 bp, Mus musculus
  misc_feature (29)..(48): n is a, c, g, or t
  misc_feature (76)..(76): n is a, c, g, or t
  misc_feature (184)..(184): n is a, c, g, or t
gcccaaggacatagccaagctggtcccgnnnnnnnnnnnnnnnnnnnnatctgaatggaggaacctcggcgttcancagagtcagggatgggtccactatatgatccatgaaccagaacctcacatcttactgttccgacggccactgcccaagaagccaaagaaatgaagccggcgaaccgcnttccggcctcgagcggtccacagctgtcctcactccctgccatctttctgatcgcgtgaccatgttgctttcttatttctcactttgatatgtaaaggatacactgtttgaatgtgctggtacctgctttg

SEQ ID NO: 2336 - DNA, 315 bp, Mus musculus; identical to SEQ ID NO: 2335
  misc_feature (29)..(48): n is a, c, g, or t
  misc_feature (76)..(76): n is a, c, g, or t
  misc_feature (184)..(184): n is a, c, g, or t

SEQ ID NO: 2337 - DNA, 569 bp, Mus musculus
  misc_feature (259)..(259): n is a, c, g, or t
  misc_feature (265)..(265): n is a, c, g, or t
  misc_feature (268)..(268): n is a, c, g, or t
tcataagctcctggatggctggtgggtggtcaggaaaggggatatcaccggctatttcccatccatgtatctgcagaaggctggggaggagataacccaggcccagcgacagatcagaggccgcggggcaccacctcgaaggtcgaccatccgcaacgcacagagcatccaccagcgttctcggaagcgccttagccaggacacctatcgccgcaacagcgtccgattcctgcagcagcgcagacgcccggggcgaccncgggcngcngagcacggatggcacaaaggacaatccatcgactccgcgcgtcaaaccacagcccgcggtgcctccgcgacccagctcggacctcatcctgcaccgctgcacagagagcaccaaacggaagctgacgtccgctgtgtgagaagcagcggccctagacggctcctatccctatctctgtatatacttgtgtatagcctcaggttagagactcctcccatgccttaaggtttgaaatggactgagactctacagcaaaggacaggactgggttaatctccaccggtattgctagcatgagagg

SEQ ID NO: 2338 - DNA, 569 bp, Mus musculus; identical to SEQ ID NO: 2337
  misc_feature (259)..(259): n is a, c, g, or t
  misc_feature (265)..(265): n is a, c, g, or t
  misc_feature (268)..(268): n is a, c, g, or t

SEQ ID NO: 2339 - DNA, 262 bp, Mus musculus
  misc_feature (221)..(221): n is a, c, g, or t
gcttaacccaacaccgataaagcgtgggcggtcctgcatcctcttgtgaccctggcactcagcttggaggctatccctttgcccccccaccaattgtgccttggcgccttgtctgcccccagctgtgccttaaggactaattctggcaccccttgcctggaaactccctgaatgccttttattccttaaggaggtacacagggaaaggggctttgggcccnaccccactctgcttgggaataccaagtattccatgagttca

SEQ ID NO: 2340 - DNA, 262 bp, Mus musculus; identical to SEQ ID NO: 2339
  misc_feature (221)..(221): n is a, c, g, or t

SEQ ID NO: 2341 - DNA, 568 bp, Mus musculus
  misc_feature (69)..(69): n is a, c, g, or t
  misc_feature (167)..(207): n is a, c, g, or t
  misc_feature (256)..(256): n is a, c, g, or t
  misc_feature (287)..(287): n is a, c, g, or t
gagcccggatgcaccaacagctctgcccgcgctggccgactaccacgagtgtaccgcatgtcgcgtaancttccacagcctcgaagcttacctggctcacaagaagtactcatgccccgccgcgcctttgcgcaccactgccctctgcccctactgcccgcccaacnnnnnnnnnnnnnnnnnnnnnnnnnnnnnnnnnnnnnnnnnacacggcctgcaggtggccaagccagcggcagcccgggcgctgagcccngcacacctgccgagcgtgctccgcgcgacanccccgacggccgcgcaccacgctctccttcccctgctcccgagaatacgccttctgacccagcagatcaaggcgctcggacacccagcaagggcccgccagctcctgctcctgcgccgggtggtggtggcggccaccgctactgccgcctgtgcaacatcaggttcagcagcctgtccactttcatcgcgcacaagaagtattactgctcttctcacgccgccgagcacgtaaagtgagcctgtggggccgcaccaccaggacccttgacacttaataaag

SEQ ID NO: 2342 - DNA, 568 bp, Mus musculus; identical to SEQ ID NO: 2341
  misc_feature (69)..(69): n is a, c, g, or t
  misc_feature (167)..(207): n is a, c, g, or t
  misc_feature (256)..(256): n is a, c, g, or t
  misc_feature (287)..(287): n is a, c, g, or t

SEQ ID NO: 2343 - DNA, 386 bp, Mus musculus
  misc_feature (178)..(192): n is a, c, g, or t
  misc_feature (203)..(203): n is a, c, g, or t
  misc_feature (210)..(210): n is a, c, g, or t
cactacctgcccaggaagactactacagtcacctgaagaaggagagtgacaagccgctgtagagctgcgatccagacagcacccactgctccttcatccagaccttggaggaccaccccaaccttttgaccccaccccacccccagccgaggagagggtgctgcccgcttgcagagcnnnnnnnnnnnnnnngagggaggganggaagangggacagacaaggtcagggcccggggttgtgtgcagaggtgggaagtggcaagggtgggggcagaaagtgcacagtatcttggaccaggtccctcctcctatcccctgcttttcttctcctctatgccgaatccttggtggccactgcccctcccctaacccattggtgtgatttt

SEQ ID NO: 2344 - DNA, 386 bp, Mus musculus; identical to SEQ ID NO: 2343
  misc_feature (178)..(192): n is a, c, g, or t
  misc_feature (203)..(203): n is a, c, g, or t
  misc_feature (210)..(210): n is a, c, g, or t

SEQ ID NO: 2345 - DNA, 577 bp, Mus musculus
  misc_feature (122)..(122): n is a, c, g, or t
  misc_feature (129)..(129): n is a, c, g, or t
  misc_feature (131)..(131): n is a, c, g, or t
  misc_feature (133)..(133): n is a, c, g, or t
  misc_feature (140)..(140): n is a, c, g, or t
  misc_feature (142)..(159): n is a, c, g, or t
  misc_feature (162)..(162): n is a, c, g, or t
  misc_feature (165)..(166): n is a, c, g, or t
  misc_feature (169)..(169): n is a, c, g, or t
  misc_feature (184)..(184): n is a, c, g, or t
  misc_feature (194)..(194): n is a, c, g, or t
  misc_feature (280)..(280): n is a, c, g, or t
  misc_feature (409)..(409): n is a, c, g, or t
  misc_feature (423)..(446): n is a, c, g, or t
  misc_feature (457)..(457): n is a, c, g, or t
  misc_feature (487)..(487): n is a, c, g, or t
  misc_feature (490)..(490): n is a, c, g, or t
  misc_feature (500)..(500): n is a, c, g, or t
  misc_feature (502)..(502): n is a, c, g, or t
  misc_feature (507)..(507): n is a, c, g, or t
tctatattctctctgtggagtcccaacacatggagctcaactacacaatataaggcagaccaaccaatacatgcctgtcattcacgtgtcctttcatgtgcttgctttagggaaacagtccntcacaantntncctttcncnnnnnnnnnnnnnnnnnnatnttnnttnacatttgccccagcnaaaccccatntaacacaactgactttccaaagaacccttaagtttccatttcccagtggcaataactgtgacctgatccctaccccacatgctgtntccttttctttgggagttagcaacatttgaggatgttgtaggtactttattacatttttttgtagtttaaagagctttattaatgcaataaattaactttgtacatttttatattaaaaaaaaaaaaangactattaagggannnnnnnnnnnnnnnnnnnnnnnnagagcttgttntccaaaaacctgcttgaaaaaggcaacgtnttnttcacagtgntntcctntaaggacaacgcggctcagtcagcagctggttatggcccgggaagacaggatgcagacaacgctcatggg

SEQ ID NO: 2346 - DNA, 577 bp, Mus musculus; identical to SEQ ID NO: 2345
  misc_feature (122)..(122): n is a, c, g, or t
  misc_feature (129)..(129): n is a, c, g, or t
  misc_feature (131)..(131): n is a, c, g, or t
  misc_feature (133)..(133): n is a, c, g, or t
  misc_feature (140)..(140): n is a, c, g, or t
  misc_feature (142)..(159): n is a, c, g, or t
  misc_feature (162)..(162): n is a, c, g, or t
  misc_feature (165)..(166): n is a, c, g, or t
  misc_feature (169)..(169): n is a, c, g, or t
  misc_feature (184)..(184): n is a, c, g, or t
  misc_feature (194)..(194): n is a, c, g, or t
  misc_feature (280)..(280): n is a, c, g, or t
  misc_feature (409)..(409): n is a, c, g, or t
  misc_feature (423)..(446): n is a, c, g, or t
  misc_feature (457)..(457): n is a, c, g, or t
  misc_feature (487)..(487): n is a, c, g, or t
  misc_feature (490)..(490): n is a, c, g, or t
  misc_feature (500)..(500): n is a, c, g, or t
  misc_feature (502)..(502): n is a, c, g, or t
  misc_feature (507)..(507): n is a, c, g, or t

SEQ ID NO: 2347 - DNA, 307 bp, Mus musculus
  misc_feature (57)..(71): n is a, c, g, or t
  misc_feature (192)..(223): n is a, c, g, or t
taacacgtggttcattgatagacacgctccacaccaagagcaagcgggaaccctcannnnnnnnnnnnnnngaacgcctctttatgaagggctgtggtgccctcaagcccatacacagtacaataatgtactcacacataacacgcaaagggattattttctactttgcccctttaaatattatgtccccannnnnnnnnnnnnnnnnnnnnnnnnnnnnnnngtgacacagacattttgtgtgagacttaaaacatggtgcctatatctgagagacctctgtgacttaccgagaagatgtgaacag

SEQ ID NO: 2348 - DNA, 307 bp, Mus musculus; identical to SEQ ID NO: 2347
  misc_feature (57)..(71): n is a, c, g, or t
  misc_feature (192)..(223): n is a, c, g, or t

SEQ ID NO: 2349 - DNA, 540 bp, Mus musculus
  misc_feature (384)..(399): n is a, c, g, or t
ggctacatctacttctaccagagagtggtcagctaagagcctgccctcagcccttccacttgaagcaggggacagaccatctggcatgagggacggctgagggatggacttcagcccctgctctgtaccctttttgtttttgtccccagcagtgggaaggagctggaggtcataggagaatggccaaacaaagaggaggggtactcattagactctggggacagagcagggatgggacaggaggggccaactgcctgtccacagtgggaccttgttgcttccttcccctgccccttgaatccacagtgctctgcttctctgtgatggcccaacccctgatgtggggcgggctcttacctgtgtgtgtgtgtggatgtggctttnnnnnnnnnnnnnnnngagggagcgactgcgcctcccctccccttaagtgtttgctcccttgtggtggggcagaggaggctctgagggaaataggaccctccccacaccctttgcccttctgcctcagcctccggtctgtctttatggtcctctgga

SEQ ID NO: 2350 - DNA, 540 bp, Mus musculus; identical to SEQ ID NO: 2349
  misc_feature (384)..(399): n is a, c, g, or t

SEQ ID NO: 2351 - DNA, 508 bp, Mus musculus
  misc_feature (86)..(118): n is a, c, g, or t
  misc_feature (282)..(302): n is a, c, g, or t
  misc_feature (310)..(310): n is a, c, g, or t
  misc_feature (314)..(314): n is a, c, g, or t
  misc_feature (316)..(316): n is a, c, g, or t
  misc_feature (323)..(323): n is a, c, g, or t
  misc_feature (343)..(343): n is a, c, g, or t
  misc_feature (346)..(346): n is a, c, g, or t
  misc_feature (348)..(348): n is a, c, g, or t
  misc_feature (382)..(382): n is a, c, g, or t
  misc_feature (388)..(388): n is a, c, g, or t
  misc_feature (429)..(429): n is a, c, g, or t
  misc_feature (458)..(458): n is a, c, g, or t
  misc_feature (479)..(479): n is a, c, g, or t
ggcagtcatttttctaccacagtcattaagctctgaacccacactcaaaagattgggaggacattttgcagtaactgacgatgtgnnnnnnnnnnnnnnnnnnnnnnnnnnnnnnnnnttttctttccaaacatttgaaagatgtttgtgaagccacttcacagcaagctattgtttgtccccaaataccagtgtcccctctaacctgcctttggatacgcatcaccccagctgacttcctttccctgagctcacctgcctccgaggagttgagtgcaaacnnnnnnnnnnnnnnnnnnnnnctggcccncctntntacagtntagaccctgcttcatggagnttntntgcctaagcgtttgcatgactgagtgcttggaantcaatntttaaaatgcacaggttacacatgcagaagaaagagccatntacccaacctcccaagcaccctgcagatntccatcctgaggctgtagatntcagttctgtgtttactgtgagcccatca

SEQ ID NO: 2352 - DNA, 508 bp, Mus musculus; identical to SEQ ID NO: 2351
  misc_feature (86)..(118): n is a, c, g, or t
  misc_feature (282)..(302): n is a, c, g, or t
  misc_feature (310)..(310): n is a, c, g, or t
  misc_feature (314)..(314): n is a, c, g, or t
  misc_feature (316)..(316): n is a, c, g, or t
  misc_feature (323)..(323): n is a, c, g, or t
  misc_feature (343)..(343): n is a, c, g, or t
  misc_feature (346)..(346): n is a, c, g, or t
  misc_feature (348)..(348): n is a, c, g, or t
  misc_feature (382)..(382): n is a, c, g, or t
  misc_feature (388)..(388): n is a, c, g, or t
  misc_feature (429)..(429): n is a, c, g, or t
  misc_feature (458)..(458): n is a, c, g, or t
  misc_feature (479)..(479): n is a, c, g, or t

SEQ ID NO: 2353 - DNA, 350 bp, Mus musculus
gacatagtgcccagcgcagggcagccaccctcaccctccttccttatccttccaccagaagagaaatgtaccacagtcctgatgtgttggtgttaacattgttctgtttgacttttgtgtaaagtaatgcatgcaatcttgtaatgtggcctgaaaacaagctaactgtattagaaactattcaaaaactaggtatttttagtgacctgtaggcagtggcaaatacagacatgtgaaccttgaatacattacatttctctcaaacacaaagaaacaaacaaaaaacttttccagcgtgttctctgctgccctggagatgccgtcaccttccacccgtgtctgtgtgagtt

SEQ ID NO: 2354 - DNA, 350 bp, Mus musculus; identical to SEQ ID NO: 2353

SEQ ID NO: 2355 - DNA, 509 bp, Mus musculus
  misc_feature (167)..(205): n is a, c, g, or t
  misc_feature (223)..(224): n is a, c, g, or t
  misc_feature (355)..(370): n is a, c, g, or t
ttgttgtatcacctgtcacagatgtatgtggaggggttgtttctgagtactagactagcctctgtggtataaaacaagagtctgtctcttgggctttttagacagagctcaccgagttgaagtgtgaagtgtagttccttattgatcacatgaacgtctcctgagcnnnnnnnnnnnnnnnnnnnnnnnnnnnnnnnnnnnnnnngcagtggtgcaaactgtnnctgaggcccgaggagcttgagttcaagcctgcttcgggctgtgtagccagactgctacaaaggggttaagagagagagagagagagagagagcaagagagagagagggagagcacgcgcgagagcgagagnnnnnnnnnnnnnnnnttgagctgtgtagtctgcagagacttcagaaccacacattccttcttatgtggaattgtgaaaagaacactagatgattttatgatttacatttctacttttattgcctaatttcttttcacacttggaaggagaaggg

SEQ ID NO: 2356 - DNA, 509 bp, Mus musculus; identical to SEQ ID NO: 2355
  misc_feature (167)..(205): n is a, c, g, or t
  misc_feature (223)..(224): n is a, c, g, or t
  misc_feature (355)..(370): n is a, c, g, or t

SEQ ID NO: 2357 - DNA, 464 bp, Mus musculus
  misc_feature (29)..(30): n is a, c, g, or t
  misc_feature (32)..(57): n is a, c, g, or t
  misc_feature (423)..(438): n is a, c, g, or t
gttccgagtagaaatgctgaccatgccannannnnnnnnnnnnnnnnnnnnnnnnnnttttccctctgaagggagtgggttatactctgggtgagcttcctccagtgtcctcagaaacagtcccagaagcagtgcgccccacactgggtgcaccctatcatgtgcctcacacttcagcatttgtaacatggtgcatagaagggttgtcccagggtctgcagtaccaggaccctatctgctccttgctagaggcccctgaaccttccacacatgctacacccagcatgtttgcaacactgaggtcaaacccagggcctggcacatggtctgctgctgactgacagtctcagcctgggaaccttagaggaaactggaagggctggaagtgtcgcagctgggcagctgctcccttagtatgcactnnnnnnnnnnnnnnnnctggtgttcgtgtgtaatctcagcat

SEQ ID NO: 2358 - DNA, 464 bp, Mus musculus; identical to SEQ ID NO: 2357
  misc_feature (29)..(30): n is a, c, g, or t
  misc_feature (32)..(57): n is a, c, g, or t
  misc_feature (423)..(438): n is a, c, g, or t

SEQ ID NO: 2359 - DNA, 442 bp, Mus musculus
  misc_feature (37)..(37): n is a, c, g, or t
  misc_feature (171)..(198): n is a, c, g, or t
  misc_feature (255)..(272): n is a, c, g, or t
  misc_feature (320)..(320): n is a, c, g, or t
  misc_feature (333)..(333): n is a, c, g, or t
  misc_feature (352)..(353): n is a, c, g, or t
  misc_feature (355)..(355): n is a, c, g, or t
  misc_feature (372)..(372): n is a, c, g, or t
  misc_feature (377)..(378): n is a, c, g, or t
  misc_feature (380)..(380): n is a, c, g, or t
  misc_feature (385)..(385): n is a, c, g, or t
  misc_feature (406)..(406): n is a, c, g, or t
ttggtatgggtgagctggctttccaggaacagctgcnctttcgtggggtggtgctgctgttgctgttggcctacgtcctcctcacctacgtcctactgctcaacatgctcattgccctcatgagtgagactgtcaacagcgttgccactgacagctggagcatctggaagnnnnnnnnnnnnnnnnnnnnnnnnnnnntggagaatggttactggtggtgcaggaggaaaaggcatcgcgcagggaggctgctgnnnnnnnnnnnnnnnnnngatggtatacctgatgagcgctggtgcttcagggtggaggaagtaaantgggctgcatggnagaagacccttcccacctnntntgaggatccatcagggncaggnntnactgnttataaaaagaacccaacctntaaacctgggaagaacagtgcctcagaggaagacca

SEQ ID NO: 2360 - DNA, 442 bp, Mus musculus; identical to SEQ ID NO: 2359
  misc_feature (37)..(37): n is a, c, g, or t
  misc_feature (171)..(198): n is a, c, g, or t
  misc_feature (255)..(272): n is a, c, g, or t
  misc_feature (320)..(320): n is a, c, g, or t
  misc_feature (333)..(333): n is a, c, g, or t
  misc_feature (352)..(353): n is a, c, g, or t
  misc_feature (355)..(355): n is a, c, g, or t
  misc_feature (372)..(372): n is a, c, g, or t
  misc_feature (377)..(378): n is a, c, g, or t
  misc_feature (380)..(380): n is a, c, g, or t
  misc_feature (385)..(385): n is a, c, g, or t
  misc_feature (406)..(406): n is a, c, g, or t

SEQ ID NO: 2361 - DNA, 514 bp, Mus musculus
  misc_feature (345)..(361): n is a, c, g, or t
accccagcagagacgccaggagctggaagtcacagcactcccagctgtgcctctgcgacagccaaaggggaagctcttgtgggaggagcagaggggctgcaccccctttggactcccccatgcacgttgccttatctctcccctctagccaggaatctgttgtttctcttctgccaatctactacgattgtatatgtgccgataccgccaccccccccatggggggagggaagggtacaaggccctgcctgctccactttttctatcttggaactataccagataaaatcacttctgtttgttcagtttttcactgctagcatcccagactgctttctttcatannnnnnnnnnnnnnnnngctaaaggtcatcatggtctctcattgagagccacagaaatctaggaaatcaggaacgcctactgtcaaaatctggaacaccagaatctaaggggaacagtttacactaccatgtactgctaagtttaagaaccctcaaaacaatcaggtctg

SEQ ID NO: 2362 - DNA, 514 bp, Mus musculus; identical to SEQ ID NO: 2361
  misc_feature (345)..(361): n is a, c, g, or t

SEQ ID NO: 2363 - DNA, 289 bp, Mus musculus
  misc_feature (120)..(120): n is a, c, g, or t
  misc_feature (129)..(129): n is a, c, g, or t
  misc_feature (133)..(133): n is a, c, g, or t
  misc_feature (149)..(149): n is a, c, g, or t
ttaccatggtgtgtataagccttgaactatgcatagaactggagtttggggagtgctggatgtgtggtcatgcttggttgaggctttagtgtatgtgtttacatacacaagcacagtttntttgtttgnttanttatttatttatttanttatttatttatttatttatttatttctcagctggtcagtcagccatctcctgtaactctccagtctgaaagtgacctaacttgacaggactaggcacccctattccatgtggcttcattccaagatgacccaggatggg

SEQ ID NO: 2364 - DNA, 289 bp, Mus musculus; identical to SEQ ID NO: 2363
  misc_feature (120)..(120): n is a, c, g, or t
  misc_feature (129)..(129): n is a, c, g, or t
  misc_feature (133)..(133): n is a, c, g, or t
  misc_feature (149)..(149): n is a, c, g, or t

SEQ ID NO: 2365 - DNA, 540 bp, Mus musculus
  misc_feature (91)..(209): n is a, c, g, or t
tttcactggccatgagtcagacatcaatgccatctgtttctttcccaacggggaggccatctgcactggctcagatgacgcctcctgccgnnnnnnnnnnnnnnnnnnnnnnnnnnnnnnnnnnnnnnnnnnnnnnnnnnnnnnnnnnnnnnnnnnnnnnnnnnnnnnnnnnnnnnnnnnnnnnnnnnnnnnnnnnnnnnnnnnnnnnnacttcaactgcaatgtctgggactctctgaagtgcgagcgtgtaggcatactctctggccatgacaacagagtcagctgcctgggggtcactgctgacggcatggctgtggccactggttcctgggacagcttcctcaaaatctggaactgaggaggctagaggaagaggtgggaagccacgaaggttctcagcaggctcctcctatgccccgtctccttagggtcagtctcctatactccaggggccattcctagtaaacttccttttaagagcaggtgggattatgggagtgtgcctttggaagcatcagggacttaagggcaagaact

SEQ ID NO: 2366 - DNA, 540 bp, Mus musculus; identical to SEQ ID NO: 2365
  misc_feature (91)..(209): n is a, c, g, or t

SEQ ID NO: 2367 - DNA, 346 bp, Mus musculus
  misc_feature (33)..(33): n is a, c, g, or t
  misc_feature (191)..(191): n is a, c, g, or t
  misc_feature (196)..(196): n is a, c, g, or t
  misc_feature (198)..(198): n is a, c, g, or t
  misc_feature (202)..(202): n is a, c, g, or t
  misc_feature (207)..(207): n is a, c, g, or t
  misc_feature (215)..(215): n is a, c, g, or t
  misc_feature (218)..(218): n is a, c, g, or t
  misc_feature (226)..(226): n is a, c, g, or t
  misc_feature (229)..(231): n is a, c, g, or t
  misc_feature (234)..(234): n is a, c, g, or t
  misc_feature (236)..(236): n is a, c, g, or t
  misc_feature (293)..(293): n is a, c, g, or t
ctgcgagagtgacacagaggagaacatcgccangaggaaagcccttcacccccggaggaggagcagtacctcctaactggcccagcttgcagtggctgccagggaggtccaagttcctgccgccctgctgtgcaagctcccggaccctgcttgacatcaggatccagacattctgtgttcctgagcacttngcaananagangagtntgcaggantcngaactttncgnnnacncngggagttgtggctgtctcccggtggggaacctccagcattcctctggcttgtagttntccagaaaactggctttcatctgtctgctaacctcagaagctggaattgggtg

SEQ ID NO: 2368 - DNA, 346 bp, Mus musculus; identical to SEQ ID NO: 2367
  misc_feature (33)..(33): n is a, c, g, or t
  misc_feature (191)..(191): n is a, c, g, or t
  misc_feature (196)..(196): n is a, c, g, or t
  misc_feature (198)..(198): n is a, c, g, or t
  misc_feature (202)..(202): n is a, c, g, or t
  misc_feature (207)..(207): n is a, c, g, or t
  misc_feature (215)..(215): n is a, c, g, or t
  misc_feature (218)..(218): n is a, c, g, or t
  misc_feature (226)..(226): n is a, c, g, or t
  misc_feature (229)..(231): n is a, c, g, or t
  misc_feature (234)..(234): n is a, c, g, or t
  misc_feature (236)..(236): n is a, c, g, or t
  misc_feature (293)..(293): n is a, c, g, or t

SEQ ID NO: 2369 - DNA, 343 bp, Mus musculus
  misc_feature (38)..(52): n is a, c, g, or t
gttactcatgaaaacttgctagaaatgatgtaccaggnnnnnnnnnnnnnnncctacacattccagaccctttctttcatgagccgtctgaaggtgcagctggagcccatcccagggagactcctgcaggcagagaagtctgtgcgggtctttgagaggtatatctttgcaaagaatctatttgaaaatggctccctcagtgacatcgagtggcacatctatcaggactggcactcctttctcctgcaggagttcgcaaaccggcttttgttacacggcttcatctatctccaggcttcaccccaggtttgtatggagagactctaccagagggatagagaag

SEQ ID NO: 2370 - DNA, 343 bp, Mus musculus; identical to SEQ ID NO: 2369
  misc_feature (38)..(52): n is a, c, g, or t

SEQ ID NO: 2371 - DNA, 357 bp, Mus musculus
  misc_feature (64)..(64): n is a, c, g, or t
  misc_feature (78)..(81): n is a, c, g, or t
  misc_feature (96)..(96): n is a, c, g, or t
  misc_feature (98)..(113): n is a, c, g, or t
  misc_feature (115)..(120): n is a, c, g, or t
  misc_feature (122)..(126): n is a, c, g, or t
  misc_feature (129)..(130): n is a, c, g, or t
  misc_feature (132)..(158): n is a, c, g, or t
  misc_feature (160)..(161): n is a, c, g, or t
  misc_feature (163)..(163): n is a, c, g, or t
  misc_feature (166)..(166): n is a, c, g, or t
  misc_feature (169)..(169): n is a, c, g, or t
  misc_feature (171)..(172): n is a, c, g, or t
  misc_feature (174)..(174): n is a, c, g, or t
  misc_feature (176)..(177): n is a, c, g, or t
  misc_feature (179)..(180): n is a, c, g, or t
  misc_feature (182)..(184): n is a, c, g, or t
  misc_feature (186)..(186): n is a, c, g, or t
  misc_feature (190)..(190): n is a, c, g, or t
  misc_feature (193)..(197): n is a, c, g, or t
  misc_feature (199)..(223): n is a, c, g, or t
gaaagcacctgctccaaaggcggctggcaagaaagcgtgaggctacacagaataataaaggttntttttgacggtggnnnnaaaaaaaaaaaaaanannnnnnnnnnnnnnnnannnnnnannnnnttnngnnnnnnnnnnnnnnnnnnnnnnnnnnncnntnggntcncnntnanntnnannntncttngcnnnnntnnnnnnnnnnnnnnnnnnnnnnnnntgatttgcccctgcgattgcggttgtctccggtggtgccccgctcgttttttttgcgcggaaggctgcgtgtttccaaaagtggcgcatctgtcgtgcttaccgctttttggaaacaaacgttcaacgctgggg

SEQ ID NO: 2372 - DNA, 357 bp, Mus musculus; identical to SEQ ID NO: 2371
  misc_feature (64)..(64): n is a, c, g, or t
  misc_feature (78)..(81): n is a, c, g, or t
  misc_feature (96)..(96): n is a, c, g, or t
  misc_feature (98)..(113): n is a, c, g, or t
  misc_feature (115)..(120): n is a, c, g, or t
  misc_feature (122)..(126): n is a, c, g, or t
  misc_feature (129)..(130): n is a, c, g, or t
  misc_feature (132)..(158): n is a, c, g, or t
  misc_feature (160)..(161): n is a, c, g, or t
  misc_feature (163)..(163): n is a, c, g, or t
  misc_feature (166)..(166): n is a, c, g, or t
  misc_feature (169)..(169): n is a, c, g, or t
  misc_feature (171)..(172): n is a, c, g, or t
  misc_feature (174)..(174): n is a, c, g, or t
  misc_feature (176)..(177): n is a, c, g, or t
  misc_feature (179)..(180): n is a, c, g, or t
  misc_feature (182)..(184): n is a, c, g, or t
  misc_feature (186)..(186): n is a, c, g, or t
  misc_feature (190)..(190): n is a, c, g, or t
  misc_feature (193)..(197): n is a, c, g, or t
  misc_feature (199)..(223): n is a, c, g, or t

SEQ ID NO: 2373 - DNA, 475 bp, Mus musculus
  misc_feature (204)..(204): n is a, c, g, or t
  misc_feature (254)..(254): n is a, c, g, or t
  misc_feature (260)..(260): n is a, c, g, or t
  misc_feature (285)..(285): n is a, c, g, or t
  misc_feature (288)..(288): n is a, c, g, or t
  misc_feature (293)..(293): n is a, c, g, or t
  misc_feature (308)..(308): n is a, c, g, or t
  misc_feature (362)..(362): n is a, c, g, or t
  misc_feature (371)..(371): n is a, c, g, or t
tgctctgtctaagcatttatcacggcacaagctaagtgattgcatctggtctgcacctggctgcatctctacctgaccatgtgtgtgccttctgagaagagtaatgactagtctactgggcttttagctctttttctttttgagacagagtcttgctatgtattccatgctgtcctggaaattcacaacttccttgcctcaccnttcccaagtattgggttacagacttgagctaccacttccagctgtatcantctttntatctcctgccagagtctatccctnggntattncagcaccatacattnctcagactgaacctggaccatgtggcaggatcgtccactcaccaggctctgccnacccttttnctctcttaatctttcctctagggaagtaaatctgcccttgcctaatttacagcgtttttaagcctccgctaccttggttcttcagccactctcaagtggatcca

SEQ ID NO: 2374 - DNA, 475 bp, Mus musculus; identical to SEQ ID NO: 2373
  misc_feature (204)..(204): n is a, c, g, or t
  misc_feature (254)..(254): n is a, c, g, or t
  misc_feature (260)..(260): n is a, c, g, or t
  misc_feature (285)..(285): n is a, c, g, or t
  misc_feature (288)..(288): n is a, c, g, or t
  misc_feature (293)..(293): n is a, c, g, or t
  misc_feature (308)..(308): n is a, c, g, or t
  misc_feature (362)..(362): n is a, c, g, or t
  misc_feature (371)..(371): n is a, c, g, or t

SEQ ID NO: 2375 - DNA, 539 bp, Mus musculus
ccacagtaactgtggggctccccgaggtccccacccaggaaccagccacaggaatcggactatcttctccccgggacaagccgaggcactggagaaagagtttcagcgtgggcagtatccagattcagtggcccgtgggaagctggctgctgccacctctctgcctgaagacacggtgagggtttggttttctaacagaagagccaaatggcgcaggcaagagaagctgaaatgggaagcacagctgccaggtgcttcccaggacctgacagtaccaaaaaattctccagggatcatctctgcacagcagtcccccggcagtgtaccctcagctgccttgcctgtgctggaaccattgagtccttccttctgtcagctatgctgtgggacagcaccaggcagatgttccagtgacacctcatcccaggcctatctccaaccctactgggactgccaatccctccttcctgtggcttcctcctcatatgtggaatttgcctggccctgcctcaccacccatcctgtgcatcatctgattg

SEQ ID NO: 2376 - DNA, 539 bp, Mus musculus; identical to SEQ ID NO: 2375

SEQ ID NO: 2377 - DNA, 322 bp, Mus musculus
  misc_feature (57)..(57): n is a, c, g, or t
  misc_feature (130)..(130): n is a, c, g, or t
  misc_feature (132)..(132): n is a, c, g, or t
  misc_feature (226)..(226): n is a, c, g, or t
  misc_feature (233)..(233): n is a, c, g, or t
gtcatcgtgtgtctgggtccgagctggagatggagaagtttgtatcatccgcagggntgcagcgagcggcgggagggaagcctgcaggactctgtcccctctgtttaaagtctccagatccggagcggancngccccacccccagctgcatgcgcctcgccgctatccatcagtgtgtgcttgacaagagaaactgccacatcgggggaccctgtacctggtcccntcacccntgcccgctgtgctgtgatactcgcatggggggttctctctggccccttccacaatatactcttttccccaggggcctcgggcaaaggct

SEQ ID NO: 2378 - DNA, 322 bp, Mus musculus; identical to SEQ ID NO: 2377
  misc_feature (57)..(57): n is a, c, g, or t
  misc_feature (130)..(130): n is a, c, g, or t
  misc_feature (132)..(132): n is a, c, g, or t
  misc_feature (226)..(226): n is a, c, g, or t
  misc_feature (233)..(233): n is a, c, g, or t

SEQ ID NO: 2379 - DNA, 310 bp, Mus musculus
  misc_feature (35)..(36): n is a, c, g, or t
  misc_feature (38)..(38): n is a, c, g, or t
  misc_feature (40)..(40): n is a, c, g, or t
  misc_feature (42)..(43): n is a, c, g, or t
  misc_feature (45)..(46): n is a, c, g, or t
  misc_feature (48)..(48): n is a, c, g, or t
actgttaacatcaaggaagtggctgttgacttctnncngnannanngngaatgtcttgactgtgctcagagggcattgtacatggatgtgatgctagagaattacaacaatctactctttgtggagaataatcatcatgtgtgtgtcaaacatgatgaagtcttgggccaaggctcaaagtatagtgcccctgagcatgtgaatattcaagagaagtctaataaatggaaggaatgtggcaaaatgattcatgaatcctccaaaagtacaccttatcaaaccaacaacagagatgcctccattgaatcat

SEQ ID NO: 2380 - DNA, 310 bp, Mus musculus; identical to SEQ ID NO: 2379
  misc_feature (35)..(36): n is a, c, g, or t
  misc_feature (38)..(38): n is a, c, g, or t
  misc_feature (40)..(40): n is a, c, g, or t
  misc_feature (42)..(43): n is a, c, g, or t
  misc_feature (45)..(46): n is a, c, g, or t
  misc_feature (48)..(48): n is a, c, g, or t

SEQ ID NO: 2381 - DNA, 401 bp, Mus musculus
  misc_feature (159)..(159): n is a, c, g, or t
ctttcaaggagagatgcagttttgcaatcaagttttgttgtcagtattgaagatcacctgcagcccttaaagatggccattgattgtgctcatgcatttcatatcagaattaatgaagccaagtgccatggttctgacatctgtgtcttgatatatccnttatggactatatagatgtttctctgaatttcactggtttttttcctatagtggacaaaagtcacattatgcatgaagtccattcacaagattttagctttaccaggaggtttcacgggtcagagactgttctcagatacagcatttaaaggaagagcttcattagtgtcatcccctgcctgagtcgctctttgctcagagctgatgagaagagggattcagtgctgtgtactaggtgctac

SEQ ID NO: 2382 - DNA, 401 bp, Mus musculus; identical to SEQ ID NO: 2381
  misc_feature (159)..(159): n is a, c, g, or t

SEQ ID NO: 2383 - DNA, 450 bp, Mus musculus
taggttgccaagtctgctccactggtctcccgctccagccccgcccctccagcctccccatcctccctctgccctcactacctgtatctcaccggcgtgtgtccaccctctgggtggttcacacacactcattcacacacacacaaatctcaggaacaaacggtcccagagtcctcctcgacccctgccctgggtctctgcaggtctctgccccacgcgttcccttcgctgacaacgccaccagctgcctcctttaaagcttggtgctccggctctgggcctttcttgcgctctttctctatttctctttctgttttcttcctttttttttttctttttttcttttttaagaaaacaaaacaaaaaaaaagccaatgaaaaaaaaaaaaacggaaaacgtcatgtgagtgaagagatgtcactgtctgtggtctttggagaactagtctc

SEQ ID NO: 2384 - DNA, 450 bp, Mus musculus; identical to SEQ ID NO: 2383

SEQ ID NO: 2385 - DNA, 468 bp, Mus musculus
  misc_feature (87)..(87): n is a, c, g, or t
  misc_feature (244)..(246): n is a, c, g, or t
  misc_feature (284)..(350): n is a, c, g, or t
catctctggtaaatgtggggcttgggtgcatctggagttgcctgagccactcaagctagatcaaatggtaggttattagaagcagancaaggacgccatggctcatcactaaatggctgttttctaagcgctgcagtctcctctctaggtttctaccctcacttccttctaattggtacagagctgctgcgaccatagtacgccttctctggtgtgtcttctcgcctccaggagcccccgcagnnncttgaacagagccccgttctgctaaaatgtagtttcannnnnnnnnnnnnnnnnnnnnnnnnnnnnnnnnnnnnnnnnnnnnnnnnnnnnnnnnnnnnnnnnnnctgttcaatggccactgtccttataagaacacagaaacacagaagagggtcgtgtgaagaccaagagaagggcacgtgaatgccaaagcggagatgagagtgctgtggacacgagcca

SEQ ID NO: 2386 - DNA, 468 bp, Mus musculus; identical to SEQ ID NO: 2385
  misc_feature (87)..(87): n is a, c, g, or t
  misc_feature (244)..(246): n is a, c, g, or t
  misc_feature (284)..(350): n is a, c, g, or t

SEQ ID NO: 2387 - DNA, 566 bp, Mus musculus
  misc_feature (291)..(291): n is a, c, g, or t
  misc_feature (413)..(413): n is a, c, g, or t
gtgtttacgtgacattctatatcataagatattgataagaatgtttctaacatgtttcttccccgcccctgcacacaaataaaagtaaggattttgctaagttagcggcctgagagatgttctataaagtatctttgttagtgtgagaatcccagtttccagcaggcatgggttccctcgagcctggagtactttacagcttgcatgctaaagaagcgatctgaagaccagtgtgccagagctccgctctcaaccgtctctcctgtttcttgataataaatagtgcaaatnaaaacctaataatcatcataataaagtgcatttaattatcttcagatctagctctttaattgtgtttaacagggttgtaacaccactgcccttaaccaagccacaccccctcctcccctctncccttcacctacttggttggggtttggggagagtgggctccaggcctcaattgtttgactaaagagttatgggaaaattgatttcttatcatcttttgttggctgacttggggacaagggagaaagtaagctggaacccctacttccaagtgt

SEQ ID NO: 2388 - DNA, 566 bp, Mus musculus; identical to SEQ ID NO: 2387
  misc_feature (291)..(291): n is a, c, g, or t
  misc_feature (413)..(413): n is a, c, g, or t

SEQ ID NO: 2389 - DNA, 436 bp, Mus musculus
  misc_feature (78)..(78): n is a, c, g, or t
  misc_feature (344)..(344): n is a, c, g, or t
  misc_feature (388)..(388): n is a, c, g, or t
gtgttggtcatttgccaccaggctgtcatgcgctgcctcctggcctacttccttgacaaggcagctgaagagctgccntacctcaaatgccccttgcacacagtcctgaagctcacacccgtggcttacggttgtaaagtggagtccatattcctgaacgtggcagctgtgaacactcaccgagacagacctcagaatgtagacatatccaggccttcagaggaagcccttgtcacagtccctgctcaccagtgaccctgacctctgtcagaggggtcactccaggccatcttgtgtttgctgtactgatggtgccaccatgcaggaacactcctgaagccatngggtggctagcaacactcagaaccttcagcctggcccaccggcntctttgttgaccaccagtgacaggttgggtatggctgctgagaatccc

SEQ ID NO: 2390 - DNA, 436 bp, Mus musculus; identical to SEQ ID NO: 2389
  misc_feature (78)..(78): n is a, c, g, or t
  misc_feature (344)..(344): n is a, c, g, or t
  misc_feature (388)..(388): n is a, c, g, or t

SEQ ID NO: 2391 - DNA, 572 bp, Mus musculus
  misc_feature (26)..(26): n is a, c, g, or t
  misc_feature (65)..(65): n is a, c, g, or t
  misc_feature (74)..(74): n is a, c, g, or t
  misc_feature (82)..(82): n is a, c, g, or t
  misc_feature (90)..(90): n is a, c, g, or t
  misc_feature (95)..(95): n is a, c, g, or t
  misc_feature (313)..(313): n is a, c, g, or t
cagctaacgaaaccatgatgagcctngggaatctgtcagcacaagtgtcattaggattgcacagnccttagcancatgaagnctgcattngtttngttccctattttttcttctattattaatgggagggttgctgtgagttctgagttagatatgaaaccatgttagattttcagaagatgttaaaacccatcactgaagatgcagcatcttttctggaagagtgtattcagagagctccagcctgactcttagaacctgggtatattctcactaatcacctcttctaaagctctgaactgctgacgtgtgnctcggggctttgactgctgagaaactctgactccaccatctgccagcacacattgttatagtgaatgttccacagtggcacggggagggtatgcagcagtttacaacagagaaaaacatttgtttttaaagctaactttaaattgtgttgtttcacctcgagcaggagtctccttttgtcttgtttttcttgaaagtgactggttgtcttgagcacccagggtgatgatggtgtgctttagtgagttctcttgtctcta

SEQ ID NO: 2392 - DNA, 572 bp, Mus musculus; identical to SEQ ID NO: 2391
  misc_feature (26)..(26): n is a, c, g, or t
  misc_feature (65)..(65): n is a, c, g, or t
  misc_feature (74)..(74): n is a, c, g, or t
  misc_feature (82)..(82): n is a, c, g, or t
  misc_feature (90)..(90): n is a, c, g, or t
  misc_feature (95)..(95): n is a, c, g, or t
  misc_feature (313)..(313): n is a, c, g, or t

SEQ ID NO: 2393 - DNA, 308 bp, Mus musculus
  misc_feature (214)..(214): n is a, c, g, or t
gctgcgcttgccacgaggcaaaggcagccaagatgctccccgcctccctcccgcctgcacccggacctgggggcggccccccagcctccatcattcattttcctgattcccgctgtagccgccctcggaagtcagccgagtgaagcagctgttccttgcacactccacttgaccaaagatgatgataaatgaggccagagctgcgtcagggacncggctgcaagggccgtgcagggaggaaagtgggggcctatagtcccttcgccccgttcggctaagtgcgcgccggcgaaattgcgtgtgagctc

SEQ ID NO: 2394 - DNA, 308 bp, Mus musculus; identical to SEQ ID NO: 2393
  misc_feature (214)..(214): n is a, c, g, or t

SEQ ID NO: 2395 - DNA, 259 bp, Mus musculus
cacctttggccttgtcactgacatcataaccactatgagtattttaacaaaaggctagactggccaaaaaatataattgcacatagtttgtttcctgatgcagtcaaagcctgcagactatgcaggaagctctgctcacagtgagctcagccattgtggctgtgattaagtcaggactgagatcctgctgacttggccttctctcccattcctggaccacagcacacctatctctctgcatgtctgttgttcaggttga

SEQ ID NO: 2396 - DNA, 259 bp, Mus musculus; identical to SEQ ID NO: 2395

SEQ ID NO: 2397 - DNA, 462 bp, Mus musculus
  misc_feature (56)..(56): n is a, c, g, or t
  misc_feature (63)..(63): n is a, c, g, or t
  misc_feature (226)..(226): n is a, c, g, or t
gcgagatggctcagtgctcttaactgctggacctccaccctgacatttcttaattnctaatantatttcaagtgttaacttttttctagccacatgtacttgctttttatttattgttcttgggagaattgcattcgctcccccttggagtcccttctgtgtcatgattcagggtctaataggagggactgaactcttccccttcaccgttagtcttttcacgtanacctgtgctatagttatcagtgcatttctctacacaatattgcatttctaaaaacagcttttgtctaaagtaattgtccattgttcttatccctgaagggcagtatgctgaaaggaatgtgaggttaaacatgttttttgtcctgtgtgggggtgggagtcgggtgcattcatgacagggtttttccaggttgtcctggaggtccttctgtagcctaggccggtgtcaactcaagg

SEQ ID NO: 2398 - DNA, 462 bp, Mus musculus; identical to SEQ ID NO: 2397
  misc_feature (56)..(56): n is a, c, g, or t
  misc_feature (63)..(63): n is a, c, g, or t
  misc_feature (226)..(226): n is a, c, g, or t

SEQ ID NO: 2399 - DNA, 399 bp, Mus musculus
  misc_feature (216)..(216): n is a, c, g, or t
  misc_feature (228)..(228): n is a, c, g, or t
  misc_feature (232)..(232): n is a, c, g, or t
  misc_feature (234)..(235): n is a, c, g, or t
  misc_feature (237)..(237): n is a, c, g, or t
  misc_feature (248)..(248): n is a, c, g, or t
  misc_feature (255)..(256): n is a, c, g, or t
  misc_feature (258)..(258): n is a, c, g, or t
  misc_feature (281)..(281): n is a, c, g, or t
  misc_feature (318)..(318): n is a, c, g, or t
  misc_feature (322)..(322): n is a, c, g, or t
  misc_feature (324)..(324): n is a, c, g, or t
  misc_feature (329)..(329): n is a, c, g, or t
tgaagtcctgggaactggagtcaaaagtgttaatgctttcagatgggaataaacgtccctgccctgcctggccctgcctggctctgccctctcaggctttagatggactgggtgcagacagtgctgttgctatgtgagtaggaaccccagcattctgtgagagcatcccagacatcagacatccccgtccccctgtcatttctcagccctcatggnagcctgctcatngggntnngnaggccggggtntgggaanntntccaccccactacctgaggagtngggatatatcacattcctatgcaaaacgattttaatntccngnttccngcagtttatttttgctatatgtaaagtatttttatacggcttatatgatgacagcttagcaataaacagt

SEQ ID NO: 2400 - DNA, 399 bp, Mus musculus; identical to SEQ ID NO: 2399
  misc_feature (216)..(216): n is a, c, g, or t
  misc_feature (228)..(228): n is a, c, g, or t
  misc_feature (232)..(232): n is a, c, g, or t
  misc_feature (234)..(235): n is a, c, g, or t
  misc_feature (237)..(237): n is a, c, g, or t
  misc_feature (248)..(248): n is a, c, g, or t
  misc_feature (255)..(256): n is a, c, g, or t
  misc_feature (258)..(258): n is a, c, g, or t
  misc_feature (281)..(281): n is a, c, g, or t
  misc_feature (318)..(318): n is a, c, g, or t
  misc_feature (322)..(322): n is a, c, g, or t
  misc_feature (324)..(324): n is a, c, g, or t
  misc_feature (329)..(329): n is a, c, g, or t

SEQ ID NO: 2401 - DNA, 497 bp, Mus musculus
  misc_feature (317)..(317): n is a, c, g, or t
  misc_feature (352)..(352): n is a, c, g, or t
  misc_feature (354)..(354): n is a, c, g, or t
  misc_feature (359)..(359): n is a, c, g, or t
  misc_feature (386)..(386): n is a, c, g, or t
  misc_feature (402)..(402): n is a, c, g, or t
  misc_feature (422)..(422): n is a, c, g, or t
atccctcaggatggagactatgagtttctcaagagctggactgtggaggaccttcagaagaggctcttggccctcgaccccatgatggaacaggaaatggaagagatccggcagaagtaccggtccaagcggcacgcaatcctggatgccattgaagccaagaagaggaggcaacagaacttctgacaacaccagcccagccttggtggcttctgggttgctagactcatgtctgttagccagcacttctgctctgtcatctctccacagcacctttgtgaactcaggaatgtgcgccagtgggaagggctgcttgncagtcacagtgccatttggtgtgtgcatttacacngncaagntgtatcttgaagggtttgtattggtgnttttaactcagaattntagaccccaggagcagagantcctagttcagtgatagctgggaaattttttacattgtttctttttgttttccttctagtaatagcttttggttg

SEQ ID NO: 2402 - DNA, 497 bp, Mus musculus; identical to SEQ ID NO: 2401
  misc_feature (317)..(317): n is a, c, g, or t
  misc_feature (352)..(352): n is a, c, g, or t
  misc_feature (354)..(354): n is a, c, g, or t
  misc_feature (359)..(359): n is a, c, g, or t
  misc_feature (386)..(386): n is a, c, g, or t
  misc_feature (402)..(402): n is a, c, g, or t
  misc_feature (422)..(422): n is a, c, g, or t

SEQ ID NO: 2403 - DNA, 453 bp, Mus musculus
  misc_feature (30)..(30): n is a, c, g, or t
  misc_feature (208)..(394): n is a, c, g, or t
tccagggtactgagatcacagatgtgtgcnactgtagctggttctacaatgctggggagcaaatccagggctctgtgcacctcagctccggggctctgtgcagcctagacaagcactgtgcacctcagcctgtgtttctaagcacttagttctttccatagtagtgccaccgcctgtggttggttctgggataggtgtttcatgggannnnnnnnnnnnnnnnnnnnnnnnnnnnnnnnnnnnnnnnnnnnnnnnnnnnnnnnnnnnnnnnnnnnnnnnnnnnnnnnnnnnnnnnnnnnnnnnnnnnnnnnnnnnnnnnnnnnnnnnnnnnnnnnnnnnnnnnnnnnnnnnnnnnnnnnnnnnnnnnnnnnnnnnnnnnnnnnnnnnnnnnnnnctgtttctgtattcttagtatcttgtttaagaatgaatgtctggctcatgagtagaggc

SEQ ID NO: 2404 - DNA, 453 bp, Mus musculus; identical to SEQ ID NO: 2403
  misc_feature (30)..(30): n is a, c, g, or t
  misc_feature (208)..(394): n is a, c, g, or t

SEQ ID NO: 2405 - DNA, 483 bp, Mus musculus
caaagcccaggcttatatcacatgctaagataattttttgtctaattgttttatgtttatgtctttcttatttcaataattcaaactaatgacttaaaatatgcaatagtagctggttgagtattatgtatcataattttaaaaaatattgaccagaaatccctattcagtaaaattataaagtaggagatcttccaaagttgtatttttgtttgtttgtcctggttcacatcctcctttgcatgtgccatatacaaataagactttagatagagtgtatttatccccccaccccgtgaaaccaagttaccttatagatacctttagataactgtctttttttcttccttgagtttctattgtagtgaattagatttgtgtgtgcttttatgtttatcttttaagtaatttgttattttctgtattctaagttttcaaattaaaatatggaaaattattgttagttacctacattgattttgc

SEQ ID NO: 2406 - DNA, 483 bp, Mus musculus; identical to SEQ ID NO: 2405

SEQ ID NO: 2407 - DNA, 380 bp, Mus musculus
agaccagaggcatgcgtcacccagagcccctcctgctgcccccccagccagtgtacatttctcagctttgccctgtttctttctggggagttctgatctctaaacaactcttgagaaccaagaggtctcaaagatgccaaagccttgctctctggctccaggccaacgtacacaggtgatctgcccataagtcctgttttgggattagagaccaagagacagtggggacagagaaggccaggaatgagattggagagctggcctgggaagggtgtctggttgaggaggccctctacctcaccttgtggcccccttagggtagggacacacaacagcacgtctttcaacttctgctctaggccaatctctttcctcatgtg

SEQ ID NO: 2408 - DNA, 380 bp, Mus musculus; identical to SEQ ID NO: 2407

SEQ ID NO: 2409 - DNA, 413 bp, Mus musculus
  misc_feature (106)..(108): n is a, c, g, or t
  misc_feature (117)..(117): n is a, c, g, or t
  misc_feature (119)..(119): n is a, c, g, or t
tctaagagtccaccacaacagaagaaaataggaccaagttgaaggatgcattgggggcaaattaaccctcaccgggaccgcactgatattaaagttgaaggatggnnngcgggggangngactaatcctcatggggaccactcatccacaccgattatttctgcagtttatttacctcataattattacatgtttacttatttatgtgtttaatttaggctttccttatttatttaatttttgggtcacttgcttttgatattatttcttaatgtggaaactgagtatttaaaatattagatctgtatggtgatatgtttttacacatttacttagtagtaatttgaatttttaccagtttatttttttttgaaaaatgtagttttgatgataattctcatttcaggtgcctt

SEQ ID NO: 2410 - DNA, 413 bp, Mus musculus; identical to SEQ ID NO: 2409
  misc_feature (106)..(108): n is a, c, g, or t
  misc_feature (117)..(117): n is a, c, g, or t
  misc_feature (119)..(119): n is a, c, g, or t

SEQ ID NO: 2411 - DNA, 327 bp, Mus musculus
  misc_feature (48)..(48): n is a, c, g, or t
tggaaaagttctttctgccccaagtctcctggagagacactggcccangcaccttgacacccaacttctccagagatggctgggcctcaggcctccagggaggatgtgggggcagttcgagtgcttctgcactggggtcccggctcattttgtggtcacttgcattgtgttctcaggctgaagggtgtctctgctgggctccccccacgctgtggcctcctcactgtcctccagctatctcctacagggcaagtgacctggcccgtaacactcctaaaggcatgcgtgagtgcacagaactgttctaacgagtgtatgtttgatcgc

SEQ ID NO: 2412 - DNA, 327 bp, Mus musculus; identical to SEQ ID NO: 2411
  misc_feature (48)..(48): n is a, c, g, or t

SEQ ID NO: 2413 - DNA, 383 bp, Mus musculus
  misc_feature (112)..(113): n is a, c, g, or t
accgtgaaggagtcagcacgtggcctggctgctgcagaagaccggcagggtgaacgcatttccaatgctggttctgagagtgctgtcagacagaaggttgtcagctactacnnatcttctcaatacccggctgaatggatacaggagctctggtgcctctagggggaaagacggtcataggaagactttctgccggcaggtaagatccaggcaaggtggctccaggtggctttcacagtcgtactggggtctagctcatcacttcgctgccctttgccatagctcagcacccgcatcctagggagtcagagaggtggctcctgcccctgccttcgctgctcgcaggtcgcgctgggtggggaatcagcgcaaatcgcccaaac

SEQ ID NO: 2414 - DNA, 383 bp, Mus musculus; identical to SEQ ID NO: 2413
  misc_feature (112)..(113): n is a, c, g, or t

SEQ ID NO: 2415 - DNA, 274 bp, Mus musculus
  misc_feature (26)..(26): n is a, c, g, or t
  misc_feature (28)..(29): n is a, c, g, or t
catccaaggtcatagctggctcagcnannctcactccatcgttctcactgcctgtcctgccatggtgaacatggggagagaaaaagaatctgtgtgtgtctgggaaacagctacatcaactttttatttttactactctgattctgtaacacttctgagttttgttgtaattttacagaaaacaagaccacaatgataaagcagaaaaccacacggtttgtggctgaatcttagagtcacctgacctttcctggccaacaggtctacatggcca

SEQ ID NO: 2416 - DNA, 274 bp, Mus musculus; identical to SEQ ID NO: 2415
  misc_feature (26)..(26): n is a, c, g, or t
  misc_feature (28)..(29): n is a, c, g, or t

SEQ ID NO: 2417 - DNA, 485 bp, Mus musculus
  misc_feature (26)..(49): n is a, c, g, or t
  misc_feature (148)..(163): n is a, c, g, or t
  misc_feature (207)..(207): n is a, c, g, or t
  misc_feature (347)..(347): n is a, c, g, or t
caatccgctgccaatgtgaggaaggnnnnnnnnnnnnnnnnnnnnnnnnaggttctggagacatccagccaggagtcctcactggagagcgagacagacgaggatgatgacttcatggacgtatgaaggagtccacccagaggcctgnnnnnnnnnnnnnnnnacagcaaggcctgggatccctttgtccagaccctgggcaaggcnagaagcctatgtgaggtagcgtgtcctgtggtctcctaagctgcccagccccctctttacagcaccctgcctgggtccaggctgtccacacattgtgttggtccagaggaagataaggcctgtcttaggcacgtacgtgnactggctgtgttttgcgcagtagggatggcacttctttttgtaatgaaatactgactttctttccaagcccatgtccggctgatcaggcccacagccgagtgcccagggaggccagcttgggttctggtagagacatt

SEQ ID NO: 2418 - DNA, 485 bp, Mus musculus; identical to SEQ ID NO: 2417
  misc_feature (26)..(49): n is a, c, g, or t
  misc_feature (148)..(163): n is a, c, g, or t
  misc_feature (207)..(207): n is a, c, g, or t
  misc_feature (347)..(347): n is a, c, g, or t

SEQ ID NO: 2419 - DNA, 355 bp, Mus musculus
  misc_feature (322)..(322): n is a, c, g, or t
tttgcctgtctaatgccctgctccattgctttggatgaaaactcgtaccttggccagctccaccactgtcaggttctccagttctgactggggttgtggtgatggcggtaggtgggaagatccaccctggctcaggagcctgacttgacactggttctttcagccctaagccagcatctgaggtgtgctgtgctcctgggatccattaatttcaccttttcggctggcttctctcatccttctgccattagccagaggggcgggttgtgaactggagccggtgactgtcctctcaccatggactgaagcacagtggtgactntaggaagctggccacctcgaagctgtacatcct

SEQ ID NO: 2420 - DNA, 355 bp, Mus musculus; identical to SEQ ID NO: 2419
  misc_feature (322)..(322): n is a, c, g, or t

SEQ ID NO: 2421 - DNA, 281 bp, Mus musculus
cagctgtcaggtagacattctctctcttccccacgtcacaagtgtaggtaaaaacctgtaagttacacgggggcaggatttcctcctcaccttttccagcttgcagagcagcagcgtcggccgcctccaggtcccggtagatgtggcgaaccatgcctgcggtctcctcattgctctgcgtgttgatgtcccagagaaccagcagcgcccggcgccgggcgaactcgagagcaaagaggcggcccaggccgctgcccgcgcccgtgatgaggcacacctgg

SEQ ID NO: 2422 - DNA, 281 bp, Mus musculus; identical to SEQ ID NO: 2421

SEQ ID NO: 2423 - DNA, 464 bp, Mus musculus
  misc_feature (42)..(80): n is a, c, g, or t
  misc_feature (142)..(162): n is a, c, g, or t
  misc_feature (351)..(351): n is a, c, g, or t
  misc_feature (362)..(362): n is a, c, g, or t
cgccctgcatggagcctgtgtgtcacagaatcgcccaacacnnnnnnnnnnnnnnnnnnnnnnnnnnnnnnnnnnnnnnnagtgttgaacctcatcccttcctgtgtcctgggctgagtgaccaggtcagtggccctgcccnnnnnnnnnnnnnnnnnnnnntggcagcagacatgtcctgtcctcatcttggacaggcctcccttccccgttggcgtgcttggtgacacgattcagggtgagcacttggccgagttggcactgagggtggtggcacagcaggccaagcctgcgtgtcacacccagcacctgctgcctgccccacccaccctccccggctctgtgccgggncaggcacctgnctgggggttctggtttttacttttttaatgtaagtctgagtctttgtaattattgaattgtgagaacaattttgaacaatttacctgtcaataaagcagaag

SEQ ID NO: 2424 - DNA, 464 bp, Mus musculus; identical to SEQ ID NO: 2423
  misc_feature (42)..(80): n is a, c, g, or t
  misc_feature (142)..(162): n is a, c, g, or t
  misc_feature (351)..(351): n is a, c, g, or t
  misc_feature (362)..(362): n is a, c, g, or t

SEQ ID NO: 2425 - DNA, 469 bp, Mus musculus
  misc_feature (36)..(36): n is a, c, g, or t
  misc_feature (113)..(113): n is a, c, g, or t
  misc_feature (186)..(186): n is a, c, g, or t
  misc_feature (240)..(240): n is a, c, g, or t
acgagcatgcataccctggaccacttacatggagtntccaacagagccagcctacactacacgggtgagagccagctaacagaggtactgcagaatcttggcaaggaccaatntccgcaacagtcacttgaacaaatcggcacccgaattgccaaggttttggaaaaaaatcagacatcctgggtnctctccagcatggcagccctctactggagagtgaaaggtcaggggaaaaaagcnattgactgcctgcgccaggccctccactacgctccccaccagatgaaggatgtgcccctcatcagcctggccaacatcctgcacaatgccaagctctggaacgatgctgtcatcgtggccaccatggccgtggagatcgcgccacactttgctgtgaaccacttcaccctgggcaatgtctacgtggcaatggaagaatttgagaaggccctggtgtggtacgagtcaa

SEQ ID NO: 2426 - DNA, 469 bp, Mus musculus; identical to SEQ ID NO: 2425
  misc_feature (36)..(36): n is a, c, g, or t
  misc_feature (113)..(113): n is a, c, g, or t
  misc_feature (186)..(186): n is a, c, g, or t
  misc_feature (240)..(240): n is a, c, g, or t

SEQ ID NO: 2427 - DNA, 321 bp, Mus musculus
  misc_feature (93)..(107): n is a, c, g, or t
  misc_feature (191)..(191): n is a, c, g, or t
gactgcacagtaaaacagtcacttttgccaacaagaatgtgtggcgccccacatctccctaccttgcactctagggccagaccactctctgtnnnnnnnnnnnnnnnttcccaaacccatggtgctttccccccgaccccactcaacctacattctgaggaggggagggatggatcagaggccatagtggncccctggataatcctgacatggggtagagtcgggtgaggcagagggagcagcacccaacacctgcactgggccacaagcgggaaagaacacgggttggttgcagttgagttgttgtctggccgtctgtat

SEQ ID NO: 2428 - DNA, 321 bp, Mus musculus; identical to SEQ ID NO: 2427
  misc_feature (93)..(107): n is a, c, g, or t
  misc_feature (191)..(191): n is a, c, g, or t

SEQ ID NO: 2429 - DNA, 548 bp, Mus musculus
  misc_feature (83)..(83): n is a, c, g, or t
  misc_feature (138)..(138): n is a, c, g, or t
  misc_feature (147)..(147): n is a, c, g, or t
  misc_feature (260)..(293): n is a, c, g, or t
  misc_feature (419)..(448): n is a, c, g, or t
  misc_feature (466)..(469): n is a, c, g, or t
  misc_feature (471)..(471): n is a, c, g, or t
  misc_feature (474)..(475): n is a, c, g, or t
  misc_feature (482)..(482): n is a, c, g, or t
  misc_feature (485)..(485): n is a, c, g, or t
  misc_feature (489)..(489): n is a, c, g, or t
  misc_feature (496)..(496): n is a, c, g, or t
  misc_feature (507)..(507): n is a, c, g, or t
  misc_feature (522)..(522): n is a, c, g, or t
gcagagactcacagatgagccaggccctgcagcttttagaaaatgagcaccaggagctgcagaccaaactcgagagcctgcanggagacggagagcagcagagctctgagacccaggacctacaagatcaactaaagnaagtcagangaagagaaacaggccctggtgagcaaagtacaacagctacagagtctgcttcagaatcaatccttacaacttcaagaacaggagaagctcttaaagaaagatcagggtctgcnnnnnnnnnnnnnnnnnnnnnnnnnnnnnnnnnngaagcctgagggcacaagaaaggagaaagaggaggagctcagagaccaactacaaaaggagacatttcagctccaagtcaaggaaaaggagctgcagtgtggtcaatggctcccagtgctgatggnnnnnnnnnnnnnnnnnnnnnnnnnnnnnntggcaaacaaaggcaacnnnntnatnngaagaanttntggnatctatntgaagtaaaantcagatgcaaacaantccatgaaaaccttgagttctggtac

SEQ ID NO: 2430 - DNA, 548 bp, Mus musculus; identical to SEQ ID NO: 2429
  misc_feature (83)..(83): n is a, c, g, or t
  misc_feature (138)..(138): n is a, c, g, or t
  misc_feature (147)..(147): n is a, c, g, or t
  misc_feature (260)..(293): n is a, c, g, or t
  misc_feature (419)..(448): n is a, c, g, or t
  misc_feature (466)..(469): n is a, c, g, or t
  misc_feature (471)..(471): n is a, c, g, or t
  misc_feature (474)..(475): n is a, c, g, or t
  misc_feature (482)..(482): n is a, c, g, or t
  misc_feature (485)..(485): n is a, c, g, or t
  misc_feature (489)..(489): n is a, c, g, or t
  misc_feature (496)..(496): n is a, c, g, or t
  misc_feature (507)..(507): n is a, c, g, or t
  misc_feature (522)..(522): n is a, c, g, or t

SEQ ID NO: 2431 - DNA, 190 bp, Mus musculus
  misc_feature (37)..(37): n is a, c, g, or t
  misc_feature (92)..(92): n is a, c, g, or t
  misc_feature (101)..(101): n is a, c, g, or t
gcaccaggagctgcagaccaaactcgagagcctgcanggagacggagagcagcagagctctgagacccaggacctacaagatcaactaaagnaagtcagangaagagaaacaggccctggtgagcaaagtacaacagctacagagtctgcttcagaatcaatccttacaacttcaagaacaggagaagct

SEQ ID NO: 2432 - DNA, 190 bp, Mus musculus; identical to SEQ ID NO: 2431
  misc_feature (37)..(37): n is a, c, g, or t
  misc_feature (92)..(92): n is a, c, g, or t
  misc_feature (101)..(101): n is a, c, g, or t

SEQ ID NO: 2433 - DNA, 360 bp, Mus musculus
  misc_feature (95)..(95): n is a, c, g, or t
  misc_feature (97)..(183): n is a, c, g, or t
  misc_feature (192)..(192): n is a, c, g, or t
  misc_feature (261)..(263): n is a, c, g, or t
  misc_feature (268)..(268): n is a, c, g, or t
  misc_feature (271)..(292): n is a, c, g, or t
  misc_feature (299)..(299): n is a, c, g, or t
  misc_feature (308)..(308): n is a, c, g, or t
ttgcttcagtattgataagctactgttactaatgacaagttcatgtcagccccaccatagaagcccctgtaagatgctgaaggcgggggttgctnannnnnnnnnnnnnnnnnnnnnnnnnnnnnnnnnnnnnnnnnnnnnnnnnnnnnnnnnnnnnnnnnnnnnnnnnnnnnnnnnnnnnnnaaacatttntacacctcctcaacccagatatctgctcggaatgactgcgatgttgtgaaggccccctgtgaattggannncttcngtnnnnnnnnnnnnnnnnnnnnnnttccttnttccatctnagagacaaaatgcccaaaatgaagtacaagtactgggccaactgacagaaga

SEQ ID NO: 2434 - DNA, 360 bp, Mus musculus; identical to SEQ ID NO: 2433
  misc_feature (95)..(95): n is a, c, g, or t
  misc_feature (97)..(183): n is a, c, g, or t
  misc_feature (192)..(192): n is a, c, g, or t
  misc_feature (261)..(263): n is a, c, g, or t
  misc_feature (268)..(268): n is a, c, g, or t
  misc_feature (271)..(292): n is a, c, g, or t
  misc_feature (299)..(299): n is a, c, g, or t
  misc_feature (308)..(308): n is a, c, g, or t

SEQ ID NO: 2435 - DNA, 367 bp, Mus musculus
  misc_feature (88)..(91): n is a, c, g, or t
  misc_feature (258)..(305): n is a, c, g, or t
  misc_feature (308)..(310): n is a, c, g, or t
  misc_feature (328)..(328): n is a, c, g, or t
gctgtgaaaactccaaagctttaatatatttggtttatgtaactggagcactgatctagcttgctgcacacactctgcctgcccccannnnaaaagcctgccatccctcgtttccagacagctgtggaagtgacacatggttacttctgtcactggacaaccagaagactcgttatgtccccttggctggaagctggcttctcctgtgccgcctataagccagctctgctcgaagttcttgggttgaatctacttggnnnnnnnnnnnnnnnnnnnnnnnnnnnnnnnnnnnnnnnnnnnnnnnngannngcctctctacactgcacntagaagatttaaacactgaagtgcttatgtggcctggac

SEQ ID NO: 2436 - DNA, 367 bp, Mus musculus; identical to SEQ ID NO: 2435
  misc_feature (88)..(91): n is a, c, g, or t
  misc_feature (258)..(305): n is a, c, g, or t
  misc_feature (308)..(310): n is a, c, g, or t
  misc_feature (328)..(328): n is a, c, g, or t

SEQ ID NO: 2437 - DNA, 199 bp, Mus musculus
  misc_feature (100)..(100): n is a, c, g, or t
atatgtcattatacaggctatcagttaatacctaattaattatgcccaactaattaaattttaatcctatatttttactaagtattttagacttaaactntatagacagataatgtaattttcaatagaaccctcccccaagcagaagtacttaacgttgagtaatctacctaagcagctttatgttacttcaagattt

SEQ ID NO: 2438 - DNA, 199 bp, Mus musculus; identical to SEQ ID NO: 2437
  misc_feature (100)..(100): n is a, c, g, or t

SEQ ID NO: 2439 - DNA, 502 bp, Mus musculus
  misc_feature (51)..(51): n is a, c, g, or t
  misc_feature (141)..(159): n is a, c, g, or t
  misc_feature (170)..(171): n is a, c, g, or t
  misc_feature (180)..(180): n is a, c, g, or t
  misc_feature (186)..(186): n is a, c, g, or t
  misc_feature (192)..(192): n is a, c, g, or t
  misc_feature (201)..(202): n is a, c, g, or t
  misc_feature (210)..(212): n is a, c, g, or t
ggatctgtttttcctccagtgtcttttcaacgtctagttgtgctttctcancttggctccttaaatttcggcattcttgttttagtctctccaccatgtccttcagcatgtggtttgaattcagtaagtcgttctccgacnnnnnnnnnnnnnnnnnnnggatctgcaanngactgattngctgtntcagtncagaatttnnaagttttnnnttttctgctttttcggtattcacaatttgttgttgaagttttaacctagtgctctgcagctccctgcgggctgcctcctctgccatctgggaggcccgcagcttctcctcacactgctccttttccgactgcctccagacatcacgctccaccttcatcttctctaagtctgataatctgttctcaagttctagcttttcatcttgtaagaccatgagtttctggtaaccttcttccttggcagcttgtactttacgtattaattcacgatctttttccactaagagcgc

SEQ ID NO: 2440 - DNA, 502 bp, Mus musculus; identical to SEQ ID NO: 2439
  misc_feature (51)..(51): n is a, c, g, or t
  misc_feature (141)..(159): n is a, c, g, or t
  misc_feature (170)..(171): n is a, c, g, or t
  misc_feature (180)..(180): n is a, c, g, or t
  misc_feature (186)..(186): n is a, c, g, or t
  misc_feature (192)..(192): n is a, c, g, or t
  misc_feature (201)..(202): n is a, c, g, or t
  misc_feature (210)..(212): n is a, c, g, or t

SEQ ID NO: 2441 - DNA, 197 bp, Mus musculus
cgctgctactggaagggtaattgaatgactgagggacctcctgcctgggaattgcttttagacacaccatggatgaagctgggcatggaggctcacatctgtaatcctagcactcagaaggctgaggcaggattgctacaactttgaagttggcttgggttacatagtaagccaggcctttgagtgtgatagcctat

SEQ ID NO: 2442 - DNA, 197 bp, Mus musculus; identical to SEQ ID NO: 2441

SEQ ID NO: 2443 - DNA, 414 bp, Mus musculus
  misc_feature (170)..(170): n is a, c, g, or t
  misc_feature (212)..(231): n is a, c, g, or t
  misc_feature (370)..(384): n is a, c, g, or t
ggcgccatcaaaaagggaagccagatactttcctttccacaattgaagccatttattacttcctagtagactaccatagtgccgtgcagaaagagaagtacagaggacagtatgacaaccttttattcttctactcttttatgtaccgcttgataaagaatgccagaggntctggagagaaggctaaaccgcagctcgtccagtagttctgnnnnnnnnnnnnnnnnnnnntcttgcagtcgagccttgtttactccggggtggtaaccatgtgttatgcccatgagagaacatggggaagattccagccttgttcgttttattgtatttttttaaagggaattttgaatttgggcaatttttaagagannnnnnnnnnnnnnngacaaatcagaagctatttgctcaatttgg

SEQ ID NO: 2444 - DNA, 414 bp, Mus musculus; identical to SEQ ID NO: 2443
  misc_feature (170)..(170): n is a, c, g, or t
  misc_feature (212)..(231): n is a, c, g, or t
  misc_feature (370)..(384): n is a, c, g, or t

SEQ ID NO: 2445 - DNA, 256 bp, Mus musculus
  misc_feature (86)..(86): n is a, c, g, or t
  misc_feature (161)..(161): n is a, c, g, or t
  misc_feature (165)..(165): n is a, c, g, or t
  misc_feature (176)..(176): n is a, c, g, or t
  misc_feature (197)..(197): n is a, c, g, or t
caatggccgcactatccgttagtgggtaattacatgcatgcggcggtcaagctgctggaacctgggtcaattatccgtggcatcgnttccatggaatgaagccccattcctcaaattccgtgaatgaggtgccccctgttgcgggttacgcgggtggttgnaaangacccgcgggnggagaggaccagagagagagngggccctgtttccactgctggcaactttgggttttgcaccactgtgttgggaagaagaa

SEQ ID NO: 2446 - DNA, 256 bp, Mus musculus; identical to SEQ ID NO: 2445
  misc_feature (86)..(86): n is a, c, g, or t
  misc_feature (161)..(161): n is a, c, g, or t
  misc_feature (165)..(165): n is a, c, g, or t
  misc_feature (176)..(176): n is a, c, g, or t
  misc_feature (197)..(197): n is a, c, g, or t

SEQ ID NO: 2447 - DNA, 553 bp, Mus musculus
  misc_feature (31)..(31): n is a, c, g, or t
  misc_feature (45)..(59): n is a, c, g, or t
  misc_feature (66)..(66): n is a, c, g, or t
  misc_feature (98)..(98): n is a, c, g, or t
  misc_feature (231)..(247): n is a, c, g, or t
  misc_feature (270)..(358): n is a, c, g, or t
  misc_feature (362)..(406): n is a, c, g, or t
  misc_feature (414)..(414): n is a, c, g, or t
tcccgtggaatacaacaatgacaccaacagnttcactgtggactnnnnnnnnnnnnnnntattccngcctgcaggagtacaacatccctggggtgatncagtcggccattggctggaaaacggtgaggatgtaccctttccagatccacagcatcgccctctccaccttcgcctcgctcatcggccctttcggagggttcttcgccagtggattcaaacgggcctttaaannnnnnnnnnnnnnnnntaccattcccggtcatggaggcnnnnnnnnnnnnnnnnnnnnnnnnnnnnnnnnnnnnnnnnnnnnnnnnnnnnnnnnnnnnnnnnnnnnnnnnnnnnnnnnnnnnnnnnnctgnnnnnnnnnnnnnnnnnnnnnnnnnnnnnnnnnnnnnnnnnnnnnttcaacangctcaagtctcacctaactgacaaggggattctgacatctgccttggaagatgagtagagtccacctggggcccagagagctggagcaggatggagtgggggccagtcgccaaggccgcccagctgctgtgacttagat

SEQ ID NO: 2448 - DNA, 553 bp, Mus musculus; identical to SEQ ID NO: 2447
  misc_feature (31)..(31): n is a, c, g, or t
  misc_feature (45)..(59): n is a, c, g, or t
  misc_feature (66)..(66): n is a, c, g, or t
  misc_feature (98)..(98): n is a, c, g, or t
  misc_feature (231)..(247): n is a, c, g, or t
  misc_feature (270)..(358): n is a, c, g, or t
  misc_feature (362)..(406): n is a, c, g, or t
  misc_feature (414)..(414): n is a, c, g, or t

SEQ ID NO: 2449 - DNA, 322 bp, Mus musculus
  misc_feature (158)..(159): n is a, c, g, or t
  misc_feature (186)..(188): n is a, c, g, or t
  misc_feature (190)..(190): n is a, c, g, or t
  misc_feature (192)..(193): n is a, c, g, or t
  misc_feature (197)..(197): n is a, c, g, or t
  misc_feature (212)..(212): n is a, c, g, or t
  misc_feature (222)..(222): n is a, c, g, or t
  misc_feature (246)..(246): n is a, c, g, or t
  misc_feature (277)..(277): n is a, c, g, or t
  misc_feature (280)..(280): n is a, c, g, or t
cccaggtccctgtggtgcacagggatatgccatgtcctgccgccatgtcgacccagcttcagaacacacatctgatttgctttgctgctcactccggccccctgagcacccacagccactcgtgtactggctggtcctgtatggctgcagagcggcannagtaggggccagcaatgaggaagactnnntntnntcantgggctctctccgtncctggacagncttctgatcttacctgggagcccntgcagggaggagccctggggaatgaaccttngtntcaggctcccggggaggggcttggcctcaactgggaatggtt

SEQ ID NO: 2450 - DNA, 322 bp, Mus musculus; identical to SEQ ID NO: 2449
  misc_feature (158)..(159): n is a, c, g, or t
  misc_feature (186)..(188): n is a, c, g, or t
  misc_feature (190)..(190): n is a, c, g, or t
  misc_feature (192)..(193): n is a, c, g, or t
  misc_feature (197)..(197): n is a, c, g, or t
  misc_feature (212)..(212): n is a, c, g, or t
  misc_feature (222)..(222): n is a, c, g, or t
  misc_feature (246)..(246): n is a, c, g, or t
  misc_feature (277)..(277): n is a, c, g, or t
  misc_feature (280)..(280): n is a, c, g, or t

SEQ ID NO: 2451 - DNA, 424 bp, Mus musculus
  misc_feature (396)..(396): n is a, c, g, or t
tgaacttgcccgagccaggctggccctcgacgaaagaggacagaagctcagtgacttggaagaaaggacggcagccatgatgtccagcgcagactccttctccaaacatgctcatgagatgatgctgaaatacaaagataagaagtggtaccagttctgacaactagaactcagtaagtccagcttcaaccagaaggaaaaagaagtttccttgttgatatcactgatgtatttggggaagataacgtaaaagggacgcactttgctgagaacttctttcccagcacaatcatgcactgttttacctcagtcacacggctttaactgagaagactccccatgcgtgcaaaccggagcatagagtgtgtgctggctgtgcattgacgaacggagaantgagtggggtcacgctgacagatgaaca

SEQ ID NO: 2452 - DNA, 424 bp, Mus musculus; identical to SEQ ID NO: 2451
  misc_feature (396)..(396): n is a, c, g, or t

SEQ ID NO: 2453 - DNA, 388 bp, Mus musculus
  misc_feature (71)..(71): n is a, c, g, or t
  misc_feature (73)..(73): n is a, c, g, or t
  misc_feature (87)..(87): n is a, c, g, or t
  misc_feature (92)..(92): n is a, c, g, or t
  misc_feature (95)..(95): n is a, c, g, or t
  misc_feature (98)..(98): n is a, c, g, or t
  misc_feature (105)..(105): n is a, c, g, or t
  misc_feature (116)..(116): n is a, c, g, or t
  misc_feature (124)..(124): n is a, c, g, or t
  misc_feature (139)..(139): n is a, c, g, or t
  misc_feature (153)..(153): n is a, c, g, or t
  misc_feature (162)..(162): n is a, c, g, or t
  misc_feature (189)..(190): n is a, c, g, or t
  misc_feature (257)..(257): n is a, c, g, or t
  misc_feature (284)..(284): n is a, c, g, or t
  misc_feature (286)..(286): n is a, c, g, or t
  misc_feature (337)..(337): n is a, c, g, or t
tcaatgaagcactgtcaggtacagcgggagagcctggtgcgggcagggaagaagatcgcttaccaaggccntntcaaagacgagccntgccntantantgcaacngaatgcgacgntggaggtnttcaacatcctgttngttacaagtgagantggcagccnaaacacgtacctggtgcactgcgaggnntgtgcgcgccgtcgcagcgcgggcctacagggcgtggtggtgctagagcagtaccgcacggaggagntggcgcaggcctacgatgccttcacantngctcccgccagcacgtctcgatgaggccggacgccccgctcgcccgcccangctgggcgcggcggggccaccagcacacgcctgggctggacctaggtcccg

SEQ ID NO: 2454 - DNA, 388 bp, Mus musculus; identical to SEQ ID NO: 2453
  misc_feature (71)..(71): n is a, c, g, or t
  misc_feature (73)..(73): n is a, c, g, or t
  misc_feature (87)..(87): n is a, c, g, or t
  misc_feature (92)..(92): n is a, c, g, or t
  misc_feature (95)..(95): n is a, c, g, or t
  misc_feature (98)..(98): n is a, c, g, or t
  misc_feature (105)..(105): n is a, c, g, or t
  misc_feature (116)..(116): n is a, c, g, or t
  misc_feature (124)..(124): n is a, c, g, or t
  misc_feature (139)..(139): n is a, c, g, or t
  misc_feature (153)..(153): n is a, c, g, or t
  misc_feature (162)..(162): n is a, c, g, or t
  misc_feature (189)..(190): n is a, c, g, or t
  misc_feature (257)..(257): n is a, c, g, or t
  misc_feature (284)..(284): n is a, c, g, or t
  misc_feature (286)..(286): n is a, c, g, or t
  misc_feature (337)..(337): n is a, c, g, or t

SEQ ID NO: 2455 - DNA, 222 bp, Mus musculus
gcttctggcttggaccgagccagcctcgttagagtattaagtgcaatgagcagttatttaagagctgatctcttccacctgcacccacccgcggcttccagctctgcctgcctctgaccgtattatagccggggccgctcattcggcgctgaggacctgtggtgggcacagtggaaggtagatgttttggtctgtttatcagactggagtcctaaccctttg

SEQ ID NO: 2456 - DNA, 222 bp, Mus musculus; identical to SEQ ID NO: 2455

SEQ ID NO: 2457 - DNA, 459 bp, Mus musculus
  misc_feature (44)..(44): n is a, c, g, or t
  misc_feature (92)..(92): n is a, c, g, or t
  misc_feature (98)..(98): n is a, c, g, or t
  misc_feature (107)..(107): n is a, c, g, or t
  misc_feature (226)..(226): n is a, c, g, or t
  misc_feature (231)..(231): n is a, c, g, or t
  misc_feature (338)..(338): n is a, c, g, or t
gtcaggtgaagactgcgctgtctgaagagccaggcacaagtgcngtcaccttttttccagaattcagagagagtggctgggtggctggagcnataggnatggagttnccagtacctaccgctctgtgcacacttcccgtcagtgccgcggggctggatcgagcttggctgcccacaaggctacttgagaggaggcctctgcaaggtcgctgcttcagccacctgcntactntacagggcgccttagaatattggtaatgaaggaatcccccagtagagaaggtgtgggcctcctgccatgtctgagggcaagaggctcaagttagggaagactggacntaagagagctgaggtgggccagtgagatgcctcagcaaggaaaggtgcttaacagaggcctgcgttggctcccaggacccatatggtggaggagagaattgctgcaagttgtcctgatttc

SEQ ID NO: 2458 - DNA, 459 bp, Mus musculus; identical to SEQ ID NO: 2457
  misc_feature (44)..(44): n is a, c, g, or t
  misc_feature (92)..(92): n is a, c, g, or t
  misc_feature (98)..(98): n is a, c, g, or t
  misc_feature (107)..(107): n is a, c, g, or t
  misc_feature (226)..(226): n is a, c, g, or t
  misc_feature (231)..(231): n is a, c, g, or t
  misc_feature (338)..(338): n is a, c, g, or t

SEQ ID NO: 2459 - DNA, 288 bp, Mus musculus
  misc_feature (64)..(64): n is a, c, g, or t
acctatggcctcaaggggctgctgggtctcctccctctattctgacatgaacaggtgaagttcnttcattgttttgttaatgatatgcttgctattatgacccatatgtaaatgttactctggatacatatttatatgccatgttacttagtgacactattcaaacatttgtatgtgtatttgtgaagttgtttgcatcagtcataaagtaccaccccaccccccccaacccagaggtatgttgaataaatctagaatccagccttatgagtcacagccaacttagtt

SEQ ID NO: 2460 - DNA, 288 bp, Mus musculus; identical to SEQ ID NO: 2459
  misc_feature (64)..(64): n is a, c, g, or t

SEQ ID NO: 2461 - DNA, 500 bp, Mus musculus
  misc_feature (42)..(42): n is a, c, g, or t
  misc_feature (107)..(149): n is a, c, g, or t
  misc_feature (264)..(288): n is a, c, g, or t
  misc_feature (291)..(291): n is a, c, g, or t
  misc_feature (327)..(327): n is a, c, g, or t
  misc_feature (439)..(439): n is a, c, g, or t
  misc_feature (450)..(464): n is a, c, g, or t
aggacatgggtgtccctaccagttactgagaggcctggaagntaacttggaaggcagaagtgagcagctactgctaccgtgtgatgagaacgagccggtggatgtcnnnnnnnnnnnnnnnnnnnnnnnnnnnnnnnnnnnnnnnnnnnccccggccagcctactgtggtcagcaggagcccttcccccagtttctcccctccgctccccacctcagcagaggaacggagacaaggacattggatgcagtaggggggtccgtgnnnnnnnnnnnnnnnnnnnnnnnnnctnggtggtgctaacctatctccatgtttctcataattntaatagtggattcttttttataagcctcatcacaaacacagtgtcaccgggggagggacccagcccccttgacctgcccctttccaggtgtcctttatcactttggtgggantctttgatctnnnnnnnnnnnnnnncttggcatgcttctagacttcaacatttggattgtt

SEQ ID NO: 2462 - DNA, 500 bp, Mus musculus; identical to SEQ ID NO: 2461
  misc_feature (42)..(42): n is a, c, g, or t
  misc_feature (107)..(149): n is a, c, g, or t
  misc_feature (264)..(288): n is a, c, g, or t
  misc_feature (291)..(291): n is a, c, g, or t
  misc_feature (327)..(327): n is a, c, g, or t
  misc_feature (439)..(439): n is a, c, g, or t
  misc_feature (450)..(464): n is a, c, g, or t

SEQ ID NO: 2463 - DNA, 507 bp, Mus musculus
  misc_feature (89)..(89): n is a, c, g, or t
  misc_feature (94)..(94): n is a, c, g, or t
  misc_feature (110)..(110): n is a, c, g, or t
  misc_feature (139)..(177): n is a, c, g, or t
  misc_feature (180)..(180): n is a, c, g, or t
  misc_feature (184)..(184): n is a, c, g, or t
  misc_feature (186)..(191): n is a, c, g, or t
  misc_feature (193)..(194): n is a, c, g, or t
  misc_feature (196)..(196): n is a, c, g, or t
  misc_feature (198)..(198): n is a, c, g, or t
  misc_feature (204)..(204): n is a, c, g, or t
  misc_feature (211)..(211): n is a, c, g, or t
  misc_feature (213)..(213): n is a, c, g, or t
  misc_feature (215)..(215): n is a, c, g, or t
  misc_feature (217)..(217): n is a, c, g, or t
  misc_feature (220)..(220): n is a, c, g, or t
  misc_feature (226)..(226): n is a, c, g, or t
  misc_feature (241)..(241): n is a, c, g, or t
  misc_feature (246)..(246): n is a, c, g, or t
  misc_feature (314)..(328): n is a, c, g, or t
  misc_feature (332)..(333): n is a, c, g, or t
  misc_feature (349)..(349): n is a, c, g, or t
  misc_feature (426)..(426): n is a, c, g, or t
  misc_feature (428)..(428): n is a, c, g, or t
  misc_feature (440)..(442): n is a, c, g, or t
agccgtcgcaagtgccagcagcactgtcatcgacctggtagcactggctgcatggccactgctgtggttctgtagaacatccgccatgnccgtnccagctggcggagggnggagctgcccacctagctgggtttggacnnnnnnnnnnnnnnnnnnnnnnnnnnnnnnnnnnnnnnncancggngnnnnnntnntntntcattnaaccatnananancantaactnggtgggcagggagtntgttnccccgtccttgcattccgctggctgacctgttagacctgtccttgtgaatgccaccgtttcctctaannnnnnnnnnnnnnntttnntcggcggaagtcgctntcctgggaggcaatgagcattgccgtataggttcctgtttattagagagtatgctaataaaagtccttgtaatagcncncagccacctaannncgcggtgttttgttgtttgactgtgttagagaagtttgaatgtttgtgtcagttttgggtcagcc

SEQ ID NO: 2464 - DNA, 507 bp, Mus musculus; identical to SEQ ID NO: 2463
  misc_feature (89)..(89): n is a, c, g, or t
  misc_feature (94)..(94): n is a, c, g, or t
  misc_feature (110)..(110): n is a, c, g, or t
  misc_feature (139)..(177): n is a, c, g, or t
  misc_feature (180)..(180): n is a, c, g, or t
  misc_feature (184)..(184): n is a, c, g, or t
  misc_feature (186)..(191): n is a, c, g, or t
  misc_feature (193)..(194): n is a, c, g, or t
  misc_feature (196)..(196): n is a, c, g, or t
  misc_feature (198)..(198): n is a, c, g, or t
  misc_feature (204)..(204): n is a, c, g, or t
  misc_feature (211)..(211): n is a, c, g, or t
  misc_feature (213)..(213): n is a, c, g, or t
  misc_feature (215)..(215): n is a, c, g, or t
  misc_feature (217)..(217): n is a, c, g, or t
  misc_feature (220)..(220): n is a, c, g, or t
  misc_feature (226)..(226): n is a, c, g, or t
  misc_feature (241)..(241): n is a, c, g, or t
  misc_feature (246)..(246): n is a, c, g, or t
  misc_feature (314)..(328): n is a, c, g, or t
  misc_feature (332)..(333): n is a, c, g, or t
  misc_feature (349)..(349): n is a, c, g, or t
  misc_feature (426)..(426): n is a, c, g, or t
  misc_feature (428)..(428): n is a, c, g, or t
  misc_feature (440)..(442): n is a, c, g, or t

SEQ ID NO: 2465 - DNA, 558 bp, Mus musculus
  misc_feature (28)..(28): n is a, c, g, or t
  misc_feature (138)..(138): n is a, c, g, or t
  misc_feature (223)..(223): n is a, c, g, or t
  misc_feature (260)..(260): n is a, c, g, or t
  misc_feature (335)..(335): n is a, c, g, or t
  misc_feature (344)..(345): n is a, c, g, or t
  misc_feature (349)..(349): n is a, c, g, or t
  misc_feature (358)..(358): n is a, c, g, or t
  misc_feature (365)..(365): n is a, c, g, or t
  misc_feature (393)..(412): n is a, c, g, or t
  misc_feature (466)..(466): n is a, c, g, or t
  misc_feature (517)..(517): n is a, c, g, or t
agagccccagtgcttggcagtgcccccntgtgcattgacttcttctgtggtagcagacacccccacagccgcctcagctctccatcggaaacagataggtcctggagcagctgcagttattttggagaagtgcgttcncttttcctctttaaattgctggcactcggatgagagtgagcatttgggaagcagtgacactgggggacccttcctggcttgcccnacacaggcacaaatgcacaagctggtgcacatagtgnagaaaccacaagagaccgcgccatcggattggtggaataaatcagcccttgtcactgttccaagcacactgctanaaataaaanntacnttttgttcnttggctntaatttccaagtttgagaaaccattaannnnnnnnnnnnnnnnnnnncatttgcgtaaaaagattctgagccccacatattatggaaatcgagtgcttttntattagaacagtatcacggtgaaacagaagtttatcctttccaagaagacnaaaaagaaaaaaatgtcttaaccacagttgactgcttgatg

SEQ ID NO: 2466 - DNA, 558 bp, Mus musculus; identical to SEQ ID NO: 2465
  misc_feature (28)..(28): n is a, c, g, or t
  misc_feature (138)..(138): n is a, c, g, or t
  misc_feature (223)..(223): n is a, c, g, or t
  misc_feature (260)..(260): n is a, c, g, or t
  misc_feature (335)..(335): n is a, c, g, or t
  misc_feature (344)..(345): n is a, c, g, or t
  misc_feature (349)..(349): n is a, c, g, or t
  misc_feature (358)..(358): n is a, c, g, or t
  misc_feature (365)..(365): n is a, c, g, or t
  misc_feature (393)..(412): n is a, c, g, or t
  misc_feature (466)..(466): n is a, c, g, or t
  misc_feature (517)..(517): n is a, c, g, or t

SEQ ID NO: 2467 - DNA, 600 bp, Mus musculus
  misc_feature (123)..(123): n is a, c, g, or t
  misc_feature (145)..(145): n is a, c, g, or t
  misc_feature (147)..(148): n is a, c, g, or t
  misc_feature (479)..(479): n is a, c, g, or t
ttcctagcgctgagcatgggacagccatctgtgtatgaacagaggtgtcagcccatgtggtcacccatgggcaggagtcacagggccatcccacagctttgtcaggagttggtggataagccntccctgccaccagtggcggaancnngcaagctcaaggctggaagttcagtttctggaggcataacctgatttttgaatcttgttctaactgcagccacgtggctagaaccactgggggctcctgggacaggcacaggctcgccctaatttcatctatccaagattcagcccttcctggtgctcaagggacccgtgtcctcagacacaccaaggcccttcccaacacggcctccccgcaccctcaaccacaaagtctctaaattcaagcgtttctacttaagacatttcaaaggcagaacatgattggtgtcttttgggaaaggctactgaaaacaaactacaggagcctggcgggnctcaagactatatcattatttctgcaggacactgtaaataactcctttcctgggtgtgtggttttttgtttgtttgtttgttgattttttttttgcagttgccccggattgagctgaataa

SEQ ID NO: 2468 - DNA, 600 bp, Mus musculus; identical to SEQ ID NO: 2467
  misc_feature (123)..(123): n is a, c, g, or t
  misc_feature (145)..(145): n is a, c, g, or t
  misc_feature (147)..(148): n is a, c, g, or t
  misc_feature (479)..(479): n is a, c, g, or t

SEQ ID NO: 2469 - DNA, 531 bp, Mus musculus
  misc_feature (74)..(74): n is a, c, g, or t
  misc_feature (84)..(84): n is a, c, g, or t
  misc_feature (187)..(205): n is a, c, g, or t
  misc_feature (260)..(276): n is a, c, g, or t
  misc_feature (291)..(315): n is a, c, g, or t
  misc_feature (325)..(325): n is a, c, g, or t
  misc_feature (506)..(506): n is a, c, g, or t
gcggtttttgtcctgcggaattgttcacaaatacccgttctgatcttggtccatgtgaaaaaattcatgatganaatctaaganaacagtatgagaagagttctcgctttatgaaagttggctatgagagagattttttgcgatacttacagagtttacttgccgaggtagagcgcagaattagacnnnnnnnnnnnnnnnnnnnattatctcaaaatcagcagtcttctggggctgctggtccaacaggcaaaaatgannnnnnnnnnnnnnnnntgacagacaaaattnnnnnnnnnnnnnnnnnnnnnnnnnagttaggatntgaaggaaaggtagaagaagcccagggaatgatgaaattggttgaacagttaaaggaagagagagaattactaagatctacaacctcgactatagaaagttttgctgcccaagaaaaacagatggaagtttgtgaagtgtgtggagcctttttgatagtaggagacgcccagtcccgagtngatgaccatctgatgggaaagcaac

SEQ ID NO: 2470 - DNA, 531 bp, Mus musculus; identical to SEQ ID NO: 2469
  misc_feature (74)..(74): n is a, c, g, or t
  misc_feature (84)..(84): n is a, c, g, or t
  misc_feature (187)..(205): n is a, c, g, or t
  misc_feature (260)..(276): n is a, c, g, or t
  misc_feature (291)..(315): n is a, c, g, or t
  misc_feature (325)..(325): n is a, c, g, or t
  misc_feature (506)..(506): n is a, c, g, or t

SEQ ID NO: 2471 - DNA, 566 bp, Mus musculus
  misc_feature (111)..(111): n is a, c, g, or t
  misc_feature (116)..(116): n is a, c, g, or t
  misc_feature (121)..(121): n is a, c, g, or t
  misc_feature (128)..(128): n is a, c, g, or t
  misc_feature (130)..(130): n is a, c, g, or t
  misc_feature (142)..(142): n is a, c, g, or t
  misc_feature (145)..(145): n is a, c, g, or t
  misc_feature (154)..(154): n is a, c, g, or t
  misc_feature (176)..(176): n is a, c, g, or t
  misc_feature (384)..(389): n is a, c, g, or t
  misc_feature (391)..(391): n is a, c, g, or t
  misc_feature (405)..(405): n is a, c, g, or t
  misc_feature (453)..(453): n is a, c, g, or t
tgtgctgcaaactcccctagaagtttcaggtagtactgtccttcttaagagttttatttttaacttcatgtgctttattagcatctagtgtgattgtcatggtggtgaagnatgtntatcngacatcntnggacagaccaantancctggaganttgacaagaagattgtctgganggcctgctgggttttgctttttgggtttttggggggtggggtggggaaggagttggcttttttttttgtctttatgtaatgtttttgttttaaaggactaatgtttattacagtgttatataaaagtgtaacatattaagtgtatagaataaagggcaataacaaaaatttactcgacaccaattttagccgctataccctcctttcnnnnnnantgtggttctttccntggcattgttacagtgggaccattttatttgtttgtttgttgtttgtnttgtttttgagagttgcagcccttgcttttgtcttagtatagcctgaatggctgcactaggtttgtggagtctcctggaagctgttaggatatggataccaggtgtgctgcgt

SEQ ID NO: 2472 - DNA, 566 bp, Mus musculus; identical to SEQ ID NO: 2471
  misc_feature (111)..(111): n is a, c, g, or t
  misc_feature (116)..(116): n is a, c, g, or t
  misc_feature (121)..(121): n is a, c, g, or t
  misc_feature (128)..(128): n is a, c, g, or t
  misc_feature (130)..(130): n is a, c, g, or t
  misc_feature (142)..(142): n is a, c, g, or t
  misc_feature (145)..(145): n is a, c, g, or t
  misc_feature (154)..(154): n is a, c, g, or t
  misc_feature (176)..(176): n is a, c, g, or t
  misc_feature (384)..(389): n is a, c, g, or t
  misc_feature (391)..(391): n is a, c, g, or t
  misc_feature (405)..(405): n is a, c, g, or t
  misc_feature (453)..(453): n is a, c, g, or t

SEQ ID NO: 2473 - DNA, 214 bp, Mus musculus
  misc_feature (26)..(45): n is a, c, g, or t
  misc_feature (152)..(168): n is a, c, g, or t
gccccttcattcagtctctgagggtnnnnnnnnnnnnnnnnnnnngtgcccttttctcttattcttcaaaacactggtatgacatgtctgagcagaaagccatcactgtgtactttctcagtcctggctgttcggccctggaaaacattaannnnnnnnnnnnnnnnnagaaggtagcctctgaaggatctcagctcgtggattgtctctttct

SEQ ID NO: 2474 - DNA, 214 bp, Mus musculus; identical to SEQ ID NO: 2473
  misc_feature (26)..(45): n is a, c, g, or t
  misc_feature (152)..(168): n is a, c, g, or t

SEQ ID NO: 2475 - DNA, 274 bp, Mus musculus
  misc_feature (205)..(205): n is a, c, g, or t
  misc_feature (216)..(216): n is a, c, g, or t
  misc_feature (233)..(233): n is a, c, g, or t
  misc_feature (238)..(238): n is a, c, g, or t
cctttcgtcatggtattagataagaaggtaatgtccaaatgccttgactgaaggaagggcgcatcggtagctacagttggcaagcccactccctccacggggaggtaatcagaaggaaagaacgctccagtcacagcactgggaatatttttgtgatgagagtatatgaagctccccacctcacccgacttttattactaacgtntaaaatgttcnggcttttgtgagatacnttatnttttttaagaaaagggtttctatcatgtcctgtcca

SEQ ID NO: 2476 - DNA, 274 bp, Mus musculus; identical to SEQ ID NO: 2475
  misc_feature (205)..(205): n is a, c, g, or t
  misc_feature (216)..(216): n is a, c, g, or t
  misc_feature (233)..(233): n is a, c, g, or t
  misc_feature (238)..(238): n is a, c, g, or t

SEQ ID NO: 2477 - DNA, 499 bp, Mus musculus
  misc_feature (73)..(73): n is a, c, g, or t
  misc_feature (83)..(83): n is a, c, g, or t
  misc_feature (93)..(93): n is a, c, g, or t
  misc_feature (114)..(114): n is a, c, g, or t
  misc_feature (118)..(118): n is a, c, g, or t
  misc_feature (128)..(128): n is a, c, g, or t
  misc_feature (133)..(133): n is a, c, g, or t
  misc_feature (186)..(186): n is a, c, g, or t
  misc_feature (201)..(201): n is a, c, g, or t
caaatttaggatcttcagcattctgcttccgtttcacatgaatctacacttttaactgaatgagactccactntgattcactngtttacttantcaaaaaaaatttcagggatntctntaaatttcantgttntacgcgatgagaagtgctgttggttgatttaaggagggaccagaaataatttntactattccagtacngaaagaaaaaaaaaatactgatttatactgtttttaaaaactaagtattgataaagcccccctcagaacatttaaccttaaaattattttgaatatcgccttttattattagaagggagctgcaaatgactgacaaataccaaaaagatttacatgcaggcttcatctaaaaagcacaaagaggttctggtgtgaaatgcccaaatctcaactgttttttgtagttgctgagctaaataatgtgattcttgagtttacagatgtaagagctgtcactgaaggctgaggtccctgcatc

SEQ ID NO: 2478 - DNA, 499 bp, Mus musculus; identical to SEQ ID NO: 2477
  misc_feature (73)..(73): n is a, c, g, or t
  misc_feature (83)..(83): n is a, c, g, or t
  misc_feature (93)..(93): n is a, c, g, or t
  misc_feature (114)..(114): n is a, c, g, or t
  misc_feature (118)..(118): n is a, c, g, or t
  misc_feature (128)..(128): n is a, c, g, or t
  misc_feature (133)..(133): n is a, c, g, or t
  misc_feature (186)..(186): n is a, c, g, or t
  misc_feature (201)..(201): n is a, c, g, or t

SEQ ID NO: 2479 - DNA, 435 bp, Mus musculus
  misc_feature (100)..(100): n is a, c, g, or t
  misc_feature (105)..(105): n is a, c, g, or t
  misc_feature (123)..(123): n is a, c, g, or t
  misc_feature (132)..(132): n is a, c, g, or t
  misc_feature (189)..(189): n is a, c, g, or t
  misc_feature (191)..(191): n is a, c, g, or t
gatttatccattggatctgacttcttctttatacacaggcccttctacctggagacaaaatcttatttattttctacttctttggttttcatatttctanatggnttcacttccttggtggtntttggaganccaagaatgcaaataaatgagcactacctcaaaataaatattgggaaacctttggantntcactgctgcatggataaagcacttgatttaaagctggagtattgaattcaaggcagtaggcaataaagacaaccgcaccctatgtagcttgcaggtgaaaggctctctaggtagcctgggaaggtgatagccgtggcagacagttatataggcaaccagaagcgcttgtcttgaacagcttggatacctctcagtgccagtctttctactgcacgagtgagccttttgttctctccttctaga

SEQ ID NO: 2480 - DNA, 435 bp, Mus musculus; identical to SEQ ID NO: 2479
  misc_feature (100)..(100): n is a, c, g, or t
  misc_feature (105)..(105): n is a, c, g, or t
  misc_feature (123)..(123): n is a, c, g, or t
  misc_feature (132)..(132): n is a, c, g, or t
  misc_feature (189)..(189): n is a, c, g, or t
  misc_feature (191)..(191): n is a, c, g, or t

SEQ ID NO: 2481 - DNA, 387 bp, Mus musculus
  misc_feature (88)..(89): n is a, c, g, or t
  misc_feature (119)..(119): n is a, c, g, or t
  misc_feature (190)..(190): n is a, c, g, or t
  misc_feature (210)..(210): n is a, c, g, or t
  misc_feature (221)..(221): n is a, c, g, or t
  misc_feature (227)..(227): n is a, c, g, or t
  misc_feature (232)..(233): n is a, c, g, or t
  misc_feature (235)..(235): n is a, c, g, or t
  misc_feature (295)..(295): n is a, c, g, or t
  misc_feature (297)..(297): n is a, c, g, or t
  misc_feature (300)..(300): n is a, c, g, or t
  misc_feature (304)..(304): n is a, c, g, or t
  misc_feature (310)..(310): n is a, c, g, or t
aggacaacccaagtgcaaggcatggatttttttccagctcttttatttcttttttatcatgttaacaatagaagattccccaaagttnnaaaaaaaaaaaaaaaaactttgaaaaatanaaagtttcatcctatttacatgacatatgagcactggttccagtatcaaacatcccattacaaacaggganaaggcatgatgtcatgcttngcctgtaagangcaaancgtannanatgtgttctccctctgactcctgcgttatctgttatcctgatacataaactatttggtancnganaggntggaanactactcgtgaacttcaatgccttctgttttatttgttcttttttgttttcaaaatgtactgcattttaaagctctg

SEQ ID NO: 2482 - DNA, 387 bp, Mus musculus; identical to SEQ ID NO: 2481
  misc_feature (88)..(89): n is a, c, g, or t
  misc_feature (119)..(119): n is a, c, g, or t
  misc_feature (190)..(190): n is a, c, g, or t
  misc_feature (210)..(210): n is a, c, g, or t
  misc_feature (221)..(221): n is a, c, g, or t
  misc_feature (227)..(227): n is a, c, g, or t
  misc_feature (232)..(233): n is a, c, g, or t
  misc_feature (235)..(235): n is a, c, g, or t
  misc_feature (295)..(295): n is a, c, g, or t
  misc_feature (297)..(297): n is a, c, g, or t
  misc_feature (300)..(300): n is a, c, g, or t
  misc_feature (304)..(304): n is a, c, g, or t
  misc_feature (310)..(310): n is a, c, g, or t

SEQ ID NO: 2483 - DNA, 390 bp, Mus musculus
  misc_feature (101)..(102): n is a, c, g, or t
  misc_feature (132)..(132): n is a, c, g, or t
  misc_feature (203)..(203): n is a, c, g, or t
  misc_feature (223)..(223): n is a, c, g, or t
  misc_feature (234)..(234): n is a, c, g, or t
  misc_feature (240)..(240): n is a, c, g, or t
  misc_feature (245)..(246): n is a, c, g, or t
  misc_feature (248)..(248): n is a, c, g, or t
  misc_feature (308)..(308): n is a, c, g, or t
  misc_feature (310)..(310): n is a, c, g, or t
  misc_feature (313)..(313): n is a, c, g, or t
  misc_feature (317)..(317): n is a, c, g, or t
  misc_feature (323)..(323): n is a, c, g, or t
caacacacaccacaggacaacccaagtgcaaggcatggatttttttccagctcttttatttcttttttatcatgttaacaatagaagattccccaaagttnnaaaaaaaaaaaaaaaaactttgaaaaatanaaagtttcatcctatttacatgacatatgagcactggttccagtatcaaacatcccattacaaacaggganaaggcatgatgtcatgcttngcctgtaagangcaaancgtannanatgtgttctccctctgactcctgcgttatctgttatcctgatacataaactatttggtancnganaggntggaanactactcgtgaacttcaatgccttctgttttatttgttcttttttgttttcaaaatgtactgcattt

SEQ ID NO: 2484 - DNA, 390 bp, Mus musculus; identical to SEQ ID NO: 2483
  misc_feature (101)..(102): n is a, c, g, or t
  misc_feature (132)..(132): n is a, c, g, or t
  misc_feature (203)..(203): n is a, c, g, or t
  misc_feature (223)..(223): n is a, c, g, or t
  misc_feature (234)..(234): n is a, c, g, or t
  misc_feature (240)..(240): n is a, c, g, or t
  misc_feature (245)..(246): n is a, c, g, or t
  misc_feature (248)..(248): n is a, c, g, or t
  misc_feature (308)..(308): n is a, c, g, or t
  misc_feature (310)..(310): n is a, c, g, or t
  misc_feature (313)..(313): n is a, c, g, or t
  misc_feature (317)..(317): n is a, c, g, or t
  misc_feature (323)..(323): n is a, c, g, or t

SEQ ID NO: 2485 - DNA, 377 bp, Mus musculus
  misc_feature (26)..(27): n is a, c, g, or t
  misc_feature (29)..(29): n is a, c, g, or t
  misc_feature (33)..(33): n is a, c, g, or t
  misc_feature (36)..(38): n is a, c, g, or t
  misc_feature (40)..(46): n is a, c, g, or t
  misc_feature (48)..(49): n is a, c, g, or t
  misc_feature (66)..(80): n is a, c, g, or t
  misc_feature (110)..(110): n is a, c, g, or t
  misc_feature (112)..(114): n is a, c, g, or t
gatggggacccataagggtacagctnncntttnccnnngnnnnnnncnncctgtgcttgtgtgctnnnnnnnnnnnnnnnctcttctgctgaccccgtccaataatttantnnnccagcttggtgactcttctgatagagccctactcctggacagagattgcttttgggaggtggagtgggggcttgaaggtcaggcatgaaggccagtttagcgtctgggcctcccagctctctgggcctctgtccatgtttggaaagccccacccctacagccctggatcctctgttcagaatcaaagcagcccttccctgccccggccatgtgattgtgtttggtgattgactgaagtgctggtgctgtgtccctcaagccca

SEQ ID NO: 2486 - DNA, 377 bp, Mus musculus; identical to SEQ ID NO: 2485
  misc_feature (26)..(27): n is a, c, g, or t
  misc_feature (29)..(29): n is a, c, g, or t
  misc_feature (33)..(33): n is a, c, g, or t
  misc_feature (36)..(38): n is a, c, g, or t
  misc_feature (40)..(46): n is a, c, g, or t
  misc_feature (48)..(49): n is a, c, g, or t
  misc_feature (66)..(80): n is a, c, g, or t
  misc_feature (110)..(110): n is a, c, g, or t
  misc_feature (112)..(114): n is a, c, g, or t

SEQ ID NO: 2487 - DNA, 185 bp, Mus musculus
acagtgcagaacacagaaggcagagtattatgctttcttaccagcaatagttcatttgaaaataatgccaggtttttgccaagatcagtgtttccttgaaatgaagacagaaatagatttgtttgtgcattcttgtacctcgacatagcatcttaattttgagcagttacgcatttatctaaagg

SEQ ID NO: 2488 - DNA, 185 bp, Mus musculus; identical to SEQ ID NO: 2487

SEQ ID NO: 2489 - DNA, 199 bp, Mus musculus
  misc_feature (98)..(114): n is a, c, g, or t
gtatgaacagcaacacataatctagagttgaggttatgactactatataaattcaaatgctgcctcttacaaactaataaattctaaggttcttaaannnnnnnnnnnnnnnnntttgacttaagatggttgtatgaaactaggtatgtgtaaatataaaatacccatttaactgtcttgtacataatacatgggccta

SEQ ID NO: 2490 - DNA, 199 bp, Mus musculus; identical to SEQ ID NO: 2489
  misc_feature (98)..(114): n is a, c, g, or t

SEQ ID NO: 2491 - DNA, 196 bp, Mus musculus
  misc_feature (156)..(156): n is a, c, g, or t
gtacataatacatgggcctatagtcctttgtactcaatgaaatattttgtggaatgtttggagtattataaatacctgttgtcttcaaatgctagtcgtcttccttgcaagtttgattccatatgtataatctcatgtggagcatgtctgatttgnaaaaaaaaagggggactggtcttcactgttgttctaaact

SEQ ID NO: 2492 - DNA, 196 bp, Mus musculus; identical to SEQ ID NO: 2491
  misc_feature (156)..(156): n is a, c, g, or t

SEQ ID NO: 2493 - DNA, 372 bp, Mus musculus
  misc_feature (252)..(258): n is a, c, g, or t
  misc_feature (260)..(261): n is a, c, g, or t
caaacaatcagaaggcaactaactgtataaattatgcagagttattttcctatatctcacagtattaaaaaaataaataattaaaaattaaagaataagtaaacgagttgacctcggtcacaaatgcagttttactatcaaatcaatcattgttatttttttaaaatataatttgtacatctttgtcaatctgtacatttgggctatttgtacgtttttgtaactgtttttttttaataagcataatgtgannnnnnnanncgaggagttaaaagtcactgagtttttaggaagaaaaacctaaaaatacagttatttaacacgcatgcccaaacaagatctgtttagacctacaacgctttagaaatgttt

SEQ ID NO: 2494 - DNA, 372 bp, Mus musculus; identical to SEQ ID NO: 2493
  misc_feature (252)..(258): n is a, c, g, or t
  misc_feature (260)..(261): n is a, c, g, or t

SEQ ID NO: 2495 - DNA, 381 bp, Mus musculus
  misc_feature (96)..(96): n is a, c, g, or t
  misc_feature (102)..(102): n is a, c, g, or t
  misc_feature (130)..(130): n is a, c, g, or t
  misc_feature (166)..(166): n is a, c, g, or t
  misc_feature (327)..(327): n is a, c, g, or t
gagcagtctccaatatttggggtctgtgacacctcctccccctacaaggggctttctaggtgatttctgtgaaatcgagcccacttgattgtttcngtgaancactctagagacctttaactttctcctnacctggatcagtcatgatcaccccccccagactgtngtaccctgaatccccattggagtttccatgggatttgaggcatctgagtacctttcggtcaggattcctccccaggacccacacccctgagatgttggaaaggccctctgagattaatgtgtcctgagtcctggctacatcatcatttagaacccaatgtntctgacgctagcattccccgtgattgttccccttggtctgtgtatccctgtagc

SEQ ID NO: 2496 - DNA, 381 bp, Mus musculus; identical to SEQ ID NO: 2495
  misc_feature (96)..(96): n is a, c, g, or t
  misc_feature (102)..(102): n is a, c, g, or t
  misc_feature (130)..(130): n is a, c, g, or t
  misc_feature (166)..(166): n is a, c, g, or t
  misc_feature (327)..(327): n is a, c, g, or t

SEQ ID NO: 2497 - DNA, 429 bp, Mus musculus
  misc_feature (45)..(45): n is a, c, g, or t
  misc_feature (60)..(60): n is a, c, g, or t
  misc_feature (63)..(78): n is a, c, g, or t
  misc_feature (269)..(269): n is a, c, g, or t
  misc_feature (313)..(313): n is a, c, g, or t
  misc_feature (319)..(320): n is a, c, g, or t
  misc_feature (339)..(339): n is a, c, g, or t
  misc_feature (344)..(358): n is a, c, g, or t
ccctgatcatgatgtcctgaggctgtggtcagtaaggttggttcngctggcaggcctgcnttnnnnnnnnnnnnnnnnctccctccccaagccccgcactgaccccaggtttcaggagtggtgtcctgggcagggaaggtcatttacaatttgctaagcggaggtgactgttgggctgccagcgcaggtatgggagcgctgcccaggcctgccaagccctcgccggctacctcatgtactgtggatctcagacccttctaatcatgtgntgactcctgcaattcactcactgccttccctgtggaagtgacantaaatnngcaaggcccctcccctccnccacnnnnnnnnnnnnnnnaactacccccacactcgcccaggcaggaccggcccatggtgaccttgttctgaacccctctgtccttttgt

SEQ ID NO: 2498 - DNA, 429 bp, Mus musculus; identical to SEQ ID NO: 2497
  misc_feature (45)..(45): n is a, c, g, or t
  misc_feature (60)..(60): n is a, c, g, or t
  misc_feature (63)..(78): n is a, c, g, or t
  misc_feature (269)..(269): n is a, c, g, or t
  misc_feature (313)..(313): n is a, c, g, or t
  misc_feature (319)..(320): n is a, c, g, or t
  misc_feature (339)..(339): n is a, c, g, or t
  misc_feature (344)..(358): n is a, c, g, or t

SEQ ID NO: 2499 - DNA, 331 bp, Mus musculus
  misc_feature (29)..(29): n is a, c, g, or t
  misc_feature (35)..(35): n is a, c, g, or t
  misc_feature (40)..(40): n is a, c, g, or t
  misc_feature (51)..(51): n is a, c, g, or t
  misc_feature (275)..(275): n is a, c, g, or t
  misc_feature (283)..(283): n is a, c, g, or t
  misc_feature (295)..(295): n is a, c, g, or t
aacttcagcttgcagataaggtcttggcnacaaangcttnggctgatagcnaagtcctccttatcttgcctcagctttgtgagtgctcagattaaatgtatgtgctactatgcccacccatagaattttaaggcataaaaaaattaatgaaaatttctggagttactggatactatgttcatgttctaaataccccatcagtgtgtctcacacacacacacaaattgagcaaatgaaagatctgattttacagctcagtgaagggatggcaaatntcttgacntcaagagaaatnatggtaatgggaaatttcaaagtttgctgcatcagg

SEQ ID NO: 2500 - DNA, 331 bp, Mus musculus; identical to SEQ ID NO: 2499
  misc_feature (29)..(29): n is a, c, g, or t
  misc_feature (35)..(35): n is a, c, g, or t
  misc_feature (40)..(40): n is a, c, g, or t
  misc_feature (51)..(51): n is a, c, g, or t
  misc_feature (275)..(275): n is a, c, g, or t
  misc_feature (283)..(283): n is a, c, g, or t
  misc_feature (295)..(295): n is a, c, g, or t

SEQ ID NO: 2501 - DNA, 413 bp, Mus musculus
  misc_feature (63)..(63): n is a, c, g, or t
  misc_feature (85)..(85): n is a, c, g, or t
  misc_feature (191)..(191): n is a, c, g, or t
ctttcacagcaaaagttgggtggaaagagaaatttttatttgtgatgacacaatagagccagnatattagctaacaacgttgaanggaggtgttgggtgtttttaaatatttagttaatatattcctcatggacataaaatacattcttagttattatcattatgtcaaacaagaatggcaagcctaagtntgtgaggcatcatcacaattctgtcaaaataatgttatgcttttgaaagataaagcctgctcaatctagggatccagttgtgcagtagagttcagacttctcatccaatcttatattgtaggcatttctcaagtgttttagatattaataactaacattgggattttactttgccagccccagccttcagaactccattgtcatagtacacctgtaaaaatg

SEQ ID NO: 2502 - DNA, 413 bp, Mus musculus; identical to SEQ ID NO: 2501
  misc_feature (63)..(63): n is a, c, g, or t
  misc_feature (85)..(85): n is a, c, g, or t
  misc_feature (191)..(191): n is a, c, g, or t

SEQ ID NO: 2503 - DNA, 498 bp, Mus musculus
  misc_feature (26)..(26): n is a, c, g, or t
  misc_feature (91)..(91): n is a, c, g, or t
  misc_feature (187)..(187): n is a, c, g, or t
  misc_feature (196)..(196): n is a, c, g, or t
  misc_feature (362)..(362): n is a, c, g, or t
  misc_feature (377)..(377): n is a, c, g, or t
  misc_feature (401)..(401): n is a, c, g, or t
  misc_feature (419)..(419): n is a, c, g, or t
  misc_feature (446)..(446): n is a, c, g, or t
aggccacactaggaagtcctggtgcnaacctgctcttaacaaaagtaatgattctgtgtgcacagaactccccttaccagccctgtttgtnaaaccatcttaggcttttaatgttcacaaccactggcctttgcgaactggtggccagactgttccattggtttcaggagctgtccatcgcccctgngaataccangatggaagggggcggggaaagaggggagcattcagtttgctgatacaatcaatacataggcttcttagcaaaagtgacccacaaggcctccacttttaacaaggtgcccaggtcagactgccaaccccagtcattcctcggattgttatctccatctgatgcctgntgaatcttctctacncaaatcctcctcataaatggatcnatgatgacagctaagagnaaaaaaataagtatttttgttaggacnaaccatcatagatttttagcaatgtgtatctgtgtgtcctttatgcctttcc

SEQ ID NO: 2504 - DNA, 498 bp, Mus musculus; identical to SEQ ID NO: 2503
  misc_feature (26)..(26): n is a, c, g, or t
  misc_feature (91)..(91): n is a, c, g, or t
  misc_feature (187)..(187): n is a, c, g, or t
  misc_feature (196)..(196): n is a, c, g, or t
  misc_feature (362)..(362): n is a, c, g, or t
  misc_feature (377)..(377): n is a, c, g, or t
  misc_feature (401)..(401): n is a, c, g, or t
  misc_feature (419)..(419): n is a, c, g, or t
  misc_feature (446)..(446): n is a, c, g, or t

SEQ ID NO: 2505 - DNA, 562 bp, Mus musculus
  misc_feature (501)..(505): n is a, c, g, or t
  misc_feature (527)..(527): n is a, c, g, or t
  misc_feature (529)..(529): n is a, c, g, or t
caggatctgactgtttagcatgagagaatacccagctcggccctggtctggcttctatagatacatagtgtatacttgtgtagactttgcatatatacggatttgtagtattttcctgttttgatgtctaatctgtatctataatgtaccctagtagtcggacatacttttgattgtacaattgtacatttgtatacctgtaatgtaaatgtggaggagtttgatcaacacgaacacgtttttggtaagaagagaatcagccagcccgtgcactctgtatatcccaccttttatggtcgtagcagatagtgttgtatattgtaaattgtaatttcaaccagaagtaaatttttttcttttgaaggaataaatgttctttatacagcctagttaatgtttaaaaaggaaaaaaaaatagcttggtttatttgtcagctagtcaagacggtagtgagagcctttctaaatgttacttcagatgcttcagttcacactagtgtnnnnnccccccctttttttttaatccnanaaaaggtaatgtttcgcttattttgtgacagtc

SEQ ID NO: 2506 - DNA, 562 bp, Mus musculus; identical to SEQ ID NO: 2505
  misc_feature (501)..(505): n is a, c, g, or t
  misc_feature (527)..(527): n is a, c, g, or t
  misc_feature (529)..(529): n is a, c, g, or t

SEQ ID NO: 2507 - DNA, 229 bp, Mus musculus
  misc_feature (147)..(147): n is a, c, g, or t
ctcatgacagttttgttggtgaacaacaacaaaaagatctatttctttaaaatatatttgtgcagaaactgcatgtaattctgagttttcctcctgacatacatatgtttggggaagtattctactctatacttgccaacgtggagnacaaaatagttttctaagagcgaagaagtatatatatataaatataaatataatatccattctgtattttatgtgcagcagg

SEQ ID NO: 2508 - DNA, 229 bp, Mus musculus; identical to SEQ ID NO: 2507
  misc_feature (147)..(147): n is a, c, g, or t

SEQ ID NO: 2509 - DNA, 327 bp, Mus musculus
  misc_feature (79)..(100): n is a, c, g, or t
  misc_feature (258)..(272): n is a, c, g, or t
agcggcttggcaggaaacccatgcccccttgctatccacatcactgggtagccctttcaagtggcctgaagcctctgcnnnnnnnnnnnnnnnnnnnnnnggccttccgtctcccagctgccttgggagggcagttctgctctcaggtcttttatcctgactcatacatacctgtaaggagccgctgtcagcctggaagagaatgttccccggaaaggaaaaccttccagaacgtatgtagaagagaggagtgtaaannnnnnnnnnnnnnntagctcactgtatatgcccatgtcaactggagacatcagactttgtgcttgttaa

SEQ ID NO: 2510 - DNA, 327 bp, Mus musculus; identical to SEQ ID NO: 2509
  misc_feature (79)..(100): n is a, c, g, or t
  misc_feature (258)..(272): n is a, c, g, or t

SEQ ID NO: 2511 - DNA, 267 bp, Mus musculus
  misc_feature (26)..(26): n is a, c, g, or t
  misc_feature (63)..(63): n is a, c, g, or t
  misc_feature (69)..(69): n is a, c, g, or t
  misc_feature (77)..(77): n is a, c, g, or t
  misc_feature (114)..(114): n is a, c, g, or t
ttgtaatcagtgactgcatccaacgntggcttctgttgtgccgtcttatccagaagtcctctnaaaggnaagtcttngagggaattgcaaaaccaaaacaaaacaggatgacanccccgcatacagaattcagtcagtgtccatatattaccagtgagcacatagaaactgagctgtgaaggcaatgccctcaaaactattttactaaactgaattgcctaggtacaagttaaatgtaagtgtgatctgtaggtccagacttgccct

SEQ ID NO: 2512 - DNA, 267 bp, Mus musculus; identical to SEQ ID NO: 2511
  misc_feature (26)..(26): n is a, c, g, or t
  misc_feature (63)..(63): n is a, c, g, or t
  misc_feature (69)..(69): n is a, c, g, or t
  misc_feature (77)..(77): n is a, c, g, or t
  misc_feature (114)..(114): n is a, c, g, or t

SEQ ID NO: 2513 - DNA, 372 bp, Mus musculus
  misc_feature (183)..(183): n is a, c, g, or t
  misc_feature (209)..(209): n is a, c, g, or t
  misc_feature (211)..(211): n is a, c, g, or t
tgcacatgcgtgtgcgtgcccatctgctgtatacaccacacttgcatgtctcatactggcacatgcatctgtaatatagtttctacatcaacttatgcctaggagcagcaggtagcccactgtcaaagggctcccatttcaacccaattcctctgcactaaggcagccaatggaacccagggnttgaaaacaaaccatctaatcctatntntaagaatacttttatagagtgactgggaggcaagctaaataccaaccagtaaataacaaggagtcagggagcttcgtggatgggacccacatgggagaagctgtcagttgggtggctggcctcattgaccccagtggagccaggaagtcatgctcactgtt

SEQ ID NO: 2514 - DNA, 372 bp, Mus musculus; identical to SEQ ID NO: 2513
  misc_feature (183)..(183): n is a, c, g, or t
  misc_feature (209)..(209): n is a, c, g, or t
  misc_feature (211)..(211): n is a, c, g, or t

SEQ ID NO: 2515 - DNA, 292 bp, Mus musculus
  misc_feature (55)..(55): n is a, c, g, or t
  misc_feature (58)..(58): n is a, c, g, or t
  misc_feature (60)..(61): n is a, c, g, or t
  misc_feature (63)..(67): n is a, c, g, or t
  misc_feature (108)..(122): n is a, c, g, or t
  misc_feature (162)..(192): n is a, c, g, or t
  misc_feature (194)..(195): n is a, c, g, or t
ccttgtacagcttggggctagagattcaaatatcacttactcgttaggcctggcnttngnnannnnngaaagggatcttgccctttaagacccccagggctagagggnnnnnnnnnnnnnnnagcctctgggagccccatcctcactactgtgaaccccagnnnnnnnnnnnnnnnnnnnnnnnnnnnnnnnanngaccagtcaccgagctttgctgtttgatccttctctgcccttccctgttttcctttctatatctggcccagaagacctcttgtatgtgtggtttttc

SEQ ID NO: 2516 - DNA, 292 bp, Mus musculus; identical to SEQ ID NO: 2515
  misc_feature (55)..(55): n is a, c, g, or t
  misc_feature (58)..(58): n is a, c, g, or t
  misc_feature (60)..(61): n is a, c, g, or t
  misc_feature (63)..(67): n is a, c, g, or t
  misc_feature (108)..(122): n is a, c, g, or t
  misc_feature (162)..(192): n is a, c, g, or t
  misc_feature (194)..(195): n is a, c, g, or t

SEQ ID NO: 2517 - DNA, 424 bp, Mus musculus
  misc_feature (75)..(75): n is a, c, g, or t
  misc_feature (93)..(93): n is a, c, g, or t
  misc_feature (220)..(234): n is a, c, g, or t
  misc_feature (382)..(396): n is a, c, g, or t
cgtgactaaattaaccacagtttggtatctgagtctcaaactgaagattatttttataaatgaattttaaaaganaaaccttggctgttttanaatctcaagaaaatgaacctgctgccatgcataattttttgatgcttttgcactaggtatcttgtaaatgtcactgcatttctgatgaagggcgactgacaggtagaggtagtattgtgtgtctgannnnnnnnnnnnnnnatgacgcaccatgggctgccctcatttccatatgcttagaaataactgggcaatcaaattaccactaatgtttgggaaatgagtgaaggcacatgcacagtgtaactcctgaaagctctgacaaaccaccctcattaccaccactgannnnnnnnnnnnnnnataaaaggcatgccagtcgcatttcacc

SEQ ID NO: 2518 - DNA, 424 bp, Mus musculus; identical to SEQ ID NO: 2517
  misc_feature (75)..(75): n is a, c, g, or t
  misc_feature (93)..(93): n is a, c, g, or t
  misc_feature (220)..(234): n is a, c, g, or t
  misc_feature (382)..(396): n is a, c, g, or t

SEQ ID NO: 2519 - DNA, 363 bp, Mus musculus
  misc_feature (53)..(53): n is a, c, g, or t
  misc_feature (64)..(81): n is a, c, g, or t
  misc_feature (223)..(281): n is a, c, g, or t
tgttcaaaaggcaggctagccttacccaaattcatatatggcaggtgtcaacntcccaagcttnnnnnnnnnnnnnnnnnnttgctcactcatccttagccatgagagccattaagtgtggtccaagaaagatggctccaaaccctacccccgacccaccagtggtattcagagattaaagcagaattgtaaatagtggcttcaggagctcttttttagaatnnnnnnnnnnnnnnnnnnnnnnnnnnnnnnnnnnnnnnnnnnnnnnnnnnnnnnnnnnnttttgttgtggttttatattgtaacagcatttttttgaaactattgtatttaagataaggtttcatattatgtccacaagta

SEQ ID NO: 2520 - DNA, 363 bp, Mus musculus; identical to SEQ ID NO: 2519
  misc_feature (53)..(53): n is a, c, g, or t
  misc_feature (64)..(81): n is a, c, g, or t
  misc_feature (223)..(281): n is a, c, g, or t

SEQ ID NO: 2521 - DNA, 245 bp, Mus musculus
  misc_feature (105)..(106): n is a, c, g, or t
  misc_feature (198)..(198): n is a, c, g, or t
tgagcagccaggagcagtctgtctgggcctgatgccgggggactgacctaagggtgggtgggattcaaatctgcagagctacctctacccattgtccctgtcctnnttggatggaaaaggcaaagttaacagctgagtttgggatggggttcccacctcttccctctgtcagtgtatgccccaggagagcaccggagnctaggaccaccttacttcctgcccagagcagccaattgttccgggga

SEQ ID NO: 2522 - DNA, 245 bp, Mus musculus; identical to SEQ ID NO: 2521
  misc_feature (105)..(106): n is a, c, g, or t
  misc_feature (198)..(198): n is a, c, g, or t

SEQ ID NO: 2523 - DNA, 545 bp, Mus musculus
  misc_feature (274)..(274): n is a, c, g, or t
  misc_feature (276)..(276): n is a, c, g, or t
  misc_feature (423)..(424): n is a, c, g, or t
  misc_feature (427)..(428): n is a, c, g, or t
  misc_feature (439)..(444): n is a, c, g, or t
acattaagggatacctcatgacaccttttatggagattctgaacagctgacaaaccaagcagggaattgtatttttatttattttttatttttattttttgcgatgctctaactgtaaattagacagaagacaaaaggaaaaacacaacaagacgcagttcttcgagcagcctccaagagagaatcagagtcacaggaaaacgcctcaagcagccgccggtaccatggcgttcacacacctcccagtgtccttgtgcctctgcttcaggcgcancnagacgcgccctgggcatccgccgtctctaccatagggatgcggtgctccgtgcatccgtgtacacgtgcaaggttttgctctgcttgggtggacagcagcccctgtaccactgaactcattttgtaacagcaatttcgcttgcaaannaannaaaaaaaaaannnnnnaaataaaacacatcccttaactacatcgctatggaattaattttttttccccagggaaaactggtgtatttttttatgaacagtatcaatttggagtgacc

SEQ ID NO: 2524 - DNA, 545 bp, Mus musculus; identical to SEQ ID NO: 2523
  misc_feature (274)..(274): n is a, c, g, or t
  misc_feature (276)..(276): n is a, c, g, or t
  misc_feature (423)..(424): n is a, c, g, or t
  misc_feature (427)..(428): n is a, c, g, or t
  misc_feature (439)..(444): n is a, c, g, or t

SEQ ID NO: 2525 - DNA, 442 bp, Mus musculus
  misc_feature (38)..(38): n is a, c, g, or t
  misc_feature (143)..(143): n is a, c, g, or t
  misc_feature (347)..(361): n is a, c, g, or t
tgaccagcggtgaccaaaaccccttctgcccccttccnagaaactctacttgccctctttccaattccctctccccaaggccatggattataaagcccctctgtaagatggtgagccaggggccctaagagggcatgaagcanaccctgatcactgtctcaggcctttctgggcactgactcgaccctggcccacctcacgcccccaggccagttggcaactggtggctcttgagagctcttacgcccttcattagctgatgttggattttatatgcatttttttattgtctctaagtgtcagaactataatttattcatttctttgtgtgtgtgtgtgtgccaagnnnnnnnnnnnnnnngcctgcctccttgcccaggaggccttgccagcctgtgtgcttgtgggaacacactgtacctgagctgacaggtaccaataa

SEQ ID NO: 2526 - DNA, 442 bp, Mus musculus; identical to SEQ ID NO: 2525
  misc_feature (38)..(38): n is a, c, g, or t
  misc_feature (143)..(143): n is a, c, g, or t
  misc_feature (347)..(361): n is a, c, g, or t

SEQ ID NO: 2527 - DNA, 391 bp, Mus musculus
  misc_feature (138)..(138): n is a, c, g, or t
  misc_feature (144)..(211): n is a, c, g, or t
  misc_feature (213)..(213): n is a, c, g, or t
  misc_feature (216)..(217): n is a, c, g, or t
  misc_feature (219)..(225): n is a, c, g, or t
  misc_feature (227)..(228): n is a, c, g, or t
  misc_feature (231)..(231): n is a, c, g, or t
  misc_feature (234)..(234): n is a, c, g, or t
  misc_feature (240)..(240): n is a, c, g, or t
  misc_feature (248)..(248): n is a, c, g, or t
  misc_feature (268)..(268): n is a, c, g, or t
  misc_feature (276)..(280): n is a, c, g, or t
  misc_feature (292)..(292): n is a, c, g, or t
  misc_feature (304)..(304): n is a, c, g, or t
  misc_feature (321)..(352): n is a, c, g, or t
aggagttcccagtcccaaatcagtgccacagctgccctcggtgccctccacagcagctccaacagccctggcagagtcaggtcttgcaggccaaagccaaagggatgaccgctggctgctggtggcactcctggtgcnaacatnnnnnnnnnnnnnnnnnnnnnnnnnnnnnnnnnnnnnnnnnnnnnnnnnnnnnnnnnnnnnnnnnnnnancanncnnnnnnngnnctnctntcgctnggtcacanatgctgggaacaagagctcnacagaacnnnnnccccccagaggnagccttacaggngtacagacctgtagaannnnnnnnnnnnnnnnnnnnnnnnnnnnnnnntgggatagaagaaaaggacttgctttggacacatggctg

SEQ ID NO: 2528 - DNA, 391 bp, Mus musculus; identical to SEQ ID NO: 2527
  misc_feature (138)..(138): n is a, c, g, or t
  misc_feature (144)..(211): n is a, c, g, or t
  misc_feature (213)..(213): n is a, c, g, or t
  misc_feature (216)..(217): n is a, c, g, or t
  misc_feature (219)..(225): n is a, c, g, or t
  misc_feature (227)..(228): n is a, c, g, or t
  misc_feature (231)..(231): n is a, c, g, or t
  misc_feature (234)..(234): n is a, c, g, or t
  misc_feature (240)..(240): n is a, c, g, or t
  misc_feature (248)..(248): n is a, c, g, or t
  misc_feature (268)..(268): n is a, c, g, or t
  misc_feature (276)..(280): n is a, c, g, or t
  misc_feature (292)..(292): n is a, c, g, or t
  misc_feature (304)..(304): n is a, c, g, or t
  misc_feature (321)..(352): n is a, c, g, or t

SEQ ID NO: 2529 - DNA, 594 bp, Mus musculus
  misc_feature (26)..(61): n is a, c, g, or t
  misc_feature (65)..(65): n is a, c, g, or t
  misc_feature (73)..(73): n is a, c, g, or t
  misc_feature (245)..(245): n is a, c, g, or t
  misc_feature (257)..(257): n is a, c, g, or t
  misc_feature (335)..(379): n is a, c, g, or t
  misc_feature (387)..(387): n is a, c, g, or t
  misc_feature (389)..(389): n is a, c, g, or t
  misc_feature (431)..(452): n is a, c, g, or t
tgttggcattcttgatccgttgctgnnnnnnnnnnnnnnnnnnnnnnnnnnnnnnnnnnnngtcncttaagcnatctctactccatggctagtacctaagggtcttcccagcctggctagctagagagaagataggtgcattttgggctctcactgtaaagaagagtggtccccaaatctacttgcattgtcttgtgtacacacacacacacacacacacacacaccccagtagtcagggtaccnttttaatttttntttgaaatcaacttcttcactgtttggaaatcttgcagtttcaatgtgcacactccttggactccagaccctgtctgnnnnnnnnnnnnnnnnnnnnnnnnnnnnnnnnnnnnnnnnnnnnngggagttnanatgggcccttcaggaggcaggaagcctccatagcaacgaagnnnnnnnnnnnnnnnnnnnnnnttgacttctcacctcacctgtcctttaaagtgaggagcagagggcggcatttctatctgtactgggctcagaaggcacagtggccatattgactttacattcaactgtgtaatatgtggaaaagactcagcatgttggtcaa

SEQ ID NO: 2530 - DNA, 594 bp, Mus musculus; identical to SEQ ID NO: 2529
  misc_feature (26)..(61): n is a, c, g, or t
  misc_feature (65)..(65): n is a, c, g, or t
  misc_feature (73)..(73): n is a, c, g, or t
  misc_feature (245)..(245): n is a, c, g, or t
  misc_feature (257)..(257): n is a, c, g, or t
  misc_feature (335)..(379): n is a, c, g, or t
  misc_feature (387)..(387): n is a, c, g, or t
  misc_feature (389)..(389): n is a, c, g, or t
  misc_feature (431)..(452): n is a, c, g, or t

SEQ ID NO: 2531 - DNA, 173 bp, Mus musculus
actcatgagcactccgttcatgtgaacaccaagcccctgcaacccccccacacagttagacacaatttaaacatttaaagctgggcttggtggtgtacacctttaatctctggaggcagaagcagggagatatctgtgaattccaggtcagcctgatgtacatgcttatttat

SEQ ID NO: 2532 - DNA, 173 bp, Mus musculus; identical to SEQ ID NO: 2531

SEQ ID NO: 2533 - DNA, 455 bp, Mus musculus
  misc_feature (57)..(57): n is a, c, g, or t
  misc_feature (59)..(59): n is a, c, g, or t
  misc_feature (62)..(62): n is a, c, g, or t
  misc_feature (69)..(69): n is a, c, g, or t
  misc_feature (77)..(77): n is a, c, g, or t
  misc_feature (112)..(112): n is a, c, g, or t
  misc_feature (116)..(116): n is a, c, g, or t
  misc_feature (119)..(119): n is a, c, g, or t
  misc_feature (122)..(122): n is a, c, g, or t
  misc_feature (201)..(201): n is a, c, g, or t
  misc_feature (215)..(215): n is a, c, g, or t
  misc_feature (228)..(228): n is a, c, g, or t
  misc_feature (270)..(270): n is a, c, g, or t
  misc_feature (354)..(354): n is a, c, g, or t
actctaattttgaggctggacagttattgtattctatatttatatcaattatacctntnatntaatctnatttaaantaatttaaagattcctagagagagtctgactttcntcantcnacnatggaaatgatcatataggtttctttagaatgctggttgaattttgttttgacatttatcatgttaagaatcatgtatnttaccttactatancctaaaatactgntgtgaactggaatcaagtgtaagagtacctagcaaccaaccnactggagccgacttgcatttatctcagtgtgagagctgcacagtctgtctgtccattgctggagtctggctggtggtggcaganctacacttgcaggcatctgcttaggctgtcaccgcagttgctaagagcaacaggtgactagacagggactggaggtaaccacaggtcagagcatgtgggaa

SEQ ID NO: 2534 - DNA, 455 bp, Mus musculus; identical to SEQ ID NO: 2533
  misc_feature (57)..(57): n is a, c, g, or t
  misc_feature (59)..(59): n is a, c, g, or t
  misc_feature (62)..(62): n is a, c, g, or t
  misc_feature (69)..(69): n is a, c, g, or t
  misc_feature (77)..(77): n is a, c, g, or t
  misc_feature (112)..(112): n is a, c, g, or t
  misc_feature (116)..(116): n is a, c, g, or t
  misc_feature (119)..(119): n is a, c, g, or t
  misc_feature (122)..(122): n is a, c, g, or t
  misc_feature (201)..(201): n is a, c, g, or t
  misc_feature (215)..(215): n is a, c, g, or t
  misc_feature (228)..(228): n is a, c, g, or t
  misc_feature (270)..(270): n is a, c, g, or t
  misc_feature (354)..(354): n is a, c, g, or t

SEQ ID NO: 2535 - DNA, 429 bp, Mus musculus
  misc_feature (289)..(289): n is a, c, g, or t
  misc_feature (305)..(305): n is a, c, g, or t
  misc_feature (333)..(333): n is a, c, g, or t
tttaaacacaaactgggcttctgtagtgcctgacctttacccatagtccttcatgcctccatctcccttttctttcttcagcagaggccagactatgtagcagggccagcaaattcactgtaatttagaattgctttttactctcaactgtaagcaaaattaccagcttactagcaagcacagggaagagtgatgggagcaaatcataggggtcattagaagaaacataccagtaaaacggtcagacaacttgcctagaatgtcattgggcgagtgctttgctttgttntcggcagaaaaagctntgggagaagagagacttagggtttcagntcagtggtaaagtgcactgggtttaaatcccaagtgaaggaggaatgaaaatactgatttaaaataaaatgtgtgatagccctttaaaagggaact

SEQ ID NO: 2536 - DNA, 429 bp, Mus musculus; identical to SEQ ID NO: 2535
  misc_feature (289)..(289): n is a, c, g, or t
  misc_feature (305)..(305): n is a, c, g, or t
  misc_feature (333)..(333): n is a, c, g, or t

SEQ ID NO: 2537 - DNA, 233 bp, Mus musculus
  misc_feature (103)..(103): n is a, c, g, or t
  misc_feature (105)..(105): n is a, c, g, or t
  misc_feature (109)..(110): n is a, c, g, or t
  misc_feature (115)..(115): n is a, c, g, or t
  misc_feature (120)..(120): n is a, c, g, or t
  misc_feature (125)..(125): n is a, c, g, or t
  misc_feature (130)..(130): n is a, c, g, or t
  misc_feature (132)..(132): n is a, c, g, or t
  misc_feature (141)..(141): n is a, c, g, or t
  misc_feature (160)..(160): n is a, c, g, or t
atgacactaggatgccttgcaccttaccgaagactaggaataggaactaaaatgttaaatcatgtcctaaacatctgtgagaaggatggcacttttgacaatntntatnngcatntccanatcancaatnantcagcgatngacttttaccggaagtttngctttgagattatcgagacaaagaagaactactataagaggatagagcctgcagacgcgcatgtgcttcagaa

SEQ ID NO: 2538 - DNA, 233 bp, Mus musculus; identical to SEQ ID NO: 2537
  misc_feature (103)..(103): n is a, c, g, or t
  misc_feature (105)..(105): n is a, c, g, or t
  misc_feature (109)..(110): n is a, c, g, or t
  misc_feature (115)..(115): n is a, c, g, or t
  misc_feature (120)..(120): n is a, c, g, or t
  misc_feature (125)..(125): n is a, c, g, or t
  misc_feature (130)..(130): n is a, c, g, or t
  misc_feature (132)..(132): n is a, c, g, or t
  misc_feature (141)..(141): n is a, c, g, or t
  misc_feature (160)..(160): n is a, c, g, or t

SEQ ID NO: 2539 - DNA, 141 bp, Mus musculus
agtaacatacttgttgtttgccaacaaaattatttttggctgtgaaaattctctttgcttgcagtatctgtttctcttcctaggctctcggtggtgacccaagcctattgtaaacaagtgattatctcaaagggagatgcc

SEQ ID NO: 2540 - DNA, 141 bp, Mus musculus; identical to SEQ ID NO: 2539

SEQ ID NO: 2541 - DNA, 139 bp, Mus musculus
  misc_feature (89)..(112): n is a, c, g, or t
catacaagcccaaaaaagctcagagtatgagagaattgaaatcccaatccatattgtacctcatatcactattgggaaagtatgccttnnnnnnnnnnnnnnnnnnnnnnnnatcctgtgtcaggaagaacaggatgca

SEQ ID NO: 2542 - DNA, 139 bp, Mus musculus; identical to SEQ ID NO: 2541
  misc_feature (89)..(112): n is a, c, g, or t

SEQ ID NO: 2543 - DNA, 252 bp, Mus musculus
  misc_feature (32)..(32): n is a, c, g, or t
  misc_feature (55)..(71): n is a, c, g, or t
  misc_feature (90)..(90): n is a, c, g, or t
gccatgaaaaagcaccccttttagaatttganaaacattgtttcaatgtttaaannnnnnnnnnnnnnnnnctgagggcttgtttgtttngtttttctgtctatttgattgtttctaatgtactgatgtatttctaaggaactgtaattgttacccagggttctcctttgcacgttgtttttccatcctgcagtcaagtgcactctctgcctctgtcacctacctcttgaatttgacttcagaatcgctgcc

SEQ ID NO: 2544 - DNA, 252 bp, Mus musculus; identical to SEQ ID NO: 2543
  misc_feature (32)..(32): n is a, c, g, or t
  misc_feature (55)..(71): n is a, c, g, or t
  misc_feature (90)..(90): n is a, c, g, or t

SEQ ID NO: 2545 - DNA, 349 bp, Mus musculus
ctctttattctcttcttggtcaaggttaacagtttctaaacgattgcaaattcacttaagtaatacatttacaaagccattttacatgcattaaaagagggctacaatgtgttttacaaatactagcacttttttttcctgttatgtacctagtgttagagggtcagaataatctttctgcttggcatctcttaaaacctacctgcaagcatagcaggcttattgcatttacagttctttaatacttgtataaactatgcagaaatttttaataaagtgtaatatattttataagctaataagactgaatgggtaaaggtttttagcatgcattagtatacttgcaaat

SEQ ID NO: 2546 - DNA, 349 bp, Mus musculus; identical to SEQ ID NO: 2545

SEQ ID NO: 2547 - DNA, 467 bp, Mus musculus
ttggcacgcatgacacgtacacgttctgcctgccaggcagcagtgtctccaacaccctccttctccttgtcgagacggtctctggaaccaaaatcctagctggtttttccaactaagaattgcatgccccatgaccccaattcagggccatctgcagcccccttctaaggtggccattgtgtcaagatgccagttcaaatgaccccgggaaccgcctacctgtattcctgtagccaggcttcccagtggtctctgttcttgcgctgcaggtcagaggggctcagctgttctagccgagactgatgctccacacgttctagctcctttgtgacattggcttgagtaccaatgagtgcaaagagctgtgggttcgactgtgcaagcatcagcatcatagagagctgcctgtaaggagggtggcatgggaagtagctcaggtgctgaggcaacttccaaattgctacacc

SEQ ID NO: 2548 - DNA, 467 bp, Mus musculus; identical to SEQ ID NO: 2547

SEQ ID NO: 2549 - DNA, 497 bp, Mus musculus
  misc_feature (57)..(57): n is a, c, g, or t
  misc_feature (71)..(71): n is a, c, g, or t
  misc_feature (79)..(79): n is a, c, g, or t
  misc_feature (90)..(90): n is a, c, g, or t
  misc_feature (97)..(98): n is a, c, g, or t
  misc_feature (102)..(102): n is a, c, g, or t
  misc_feature (104)..(104): n is a, c, g, or t
  misc_feature (107)..(110): n is a, c, g, or t
  misc_feature (123)..(124): n is a, c, g, or t
  misc_feature (146)..(146): n is a, c, g, or t
  misc_feature (155)..(155): n is a, c, g, or t
  misc_feature (161)..(161): n is a, c, g, or t
  misc_feature (168)..(168): n is a, c, g, or t
  misc_feature (192)..(192): n is a, c, g, or t
  misc_feature (205)..(205): n is a, c, g, or t
  misc_feature (219)..(219): n is a, c, g, or t
  misc_feature (430)..(450): n is a, c, g, or t
gaattcaagtcctggtgtggaggctgaggcaagcacaggctggtgctgctcgagaangagctgcttcaggnaccgcttngctctacagangggaagnngctncncgnnnncaaggcttctgannacaggctgaagcagaggttacnagggctagnaagctnaactggnaagaacccaaagtgaagggaaggnccatatatgcagnagatgagccgccancggcaggccctaaaggaggagctggggacccgaagcaaacagctggaggaggaagtgagaagtctaaaggagcagctagaaacatgccaaagggaggctaagacagcgaaggaagaggctgagcgagccctcagaaagcaagatggaaccttggctcagcttcatgcccacgtggcagacatggaggccaaatatgaggaaatcttgcatnnnnnnnnnnnnnnnnnnnnngacaacctggactgtctactggccaagctgagagtggtcaagcctca

SEQ ID NO: 2550 - DNA, 497 bp, Mus musculus; identical to SEQ ID NO: 2549
  misc_feature (57)..(57): n is a, c, g, or t
  misc_feature (71)..(71): n is a, c, g, or t
  misc_feature (79)..(79): n is a, c, g, or t
  misc_feature (90)..(90): n is a, c, g, or t
  misc_feature (97)..(98): n is a, c, g, or t
  misc_feature (102)..(102): n is a, c, g, or t
  misc_feature (104)..(104): n is a, c, g, or t
  misc_feature (107)..(110): n is a, c, g, or t
  misc_feature (123)..(124): n is a, c, g, or t
  misc_feature (146)..(146): n is a, c, g, or t
  misc_feature (155)..(155): n is a, c, g, or t
  misc_feature (161)..(161): n is a, c, g, or t
  misc_feature (168)..(168): n is a, c, g, or t
  misc_feature (192)..(192): n is a, c, g, or t
  misc_feature (205)..(205): n is a, c, g, or t
  misc_feature (219)..(219): n is a, c, g, or t
  misc_feature (430)..(450): n is a, c, g, or t

SEQ ID NO: 2551 - DNA, 272 bp, Mus musculus
  misc_feature (28)..(28): n is a, c, g, or t
  misc_feature (64)..(64): n is a, c, g, or t
  misc_feature (68)..(68): n is a, c, g, or t
  misc_feature (141)..(141): n is a, c, g, or t
gattgacaccggaagcgacgaagacttnccggttgccgacgcggtcgatgcgcgaccccggcgnccgncgctgacgtcacggaccggctcggctcccatcggcgccaatcccggcttctcccgtgtcccgggccgctccgngtcgccgctgactgacgtcacagccgcgcgccccgccccacctccccgtcgccgccgcgtgacgtcagatccgcgcgcccgacccgggttccaggctgcgacgccgatctaagagccttcgcgcgtgggcg

SEQ ID NO: 2552 - DNA, 272 bp, Mus musculus; identical to SEQ ID NO: 2551
  misc_feature (28)..(28): n is a, c, g, or t
  misc_feature (64)..(64): n is a, c, g, or t
  misc_feature (68)..(68): n is a, c, g, or t
  misc_feature (141)..(141): n is a, c, g, or t

SEQ ID NO: 2553 - DNA, 356 bp, Mus musculus
  misc_feature (26)..(26): n is a, c, g, or t
  misc_feature (62)..(62): n is a, c, g, or t
  misc_feature (66)..(66): n is a, c, g, or t
  misc_feature (139)..(139): n is a, c, g, or t
  misc_feature (299)..(299): n is a, c, g, or t
  misc_feature (331)..(331): n is a, c, g, or t
ttgacaccggaagcgacgaagacttnccggttgccgacgcggtcgatgcgcgaccccggcgnccgncgctgacgtcacggaccggctcggctcccatcggcgccaatcccggcttctcccgtgtcccgggccgctccgngtcgccgctgactgacgtcacagccgcgcgccccgccccacctccccgtcgccgccgcgtgacgtcagatccgcgcgcccgacccgggttccaggctgcgacgccgatctaagagccttcgcgcgtgggcgaccccggtcccggtcctgaccccgcgtcnggggacctcacgctgaccccgcgccattggcntcacccggatttcgctgacgtcacc

SEQ ID NO: 2554 - DNA, 356 bp, Mus musculus; identical to SEQ ID NO: 2553
  misc_feature (26)..(26): n is a, c, g, or t
  misc_feature (62)..(62): n is a, c, g, or t
  misc_feature (66)..(66): n is a, c, g, or t
  misc_feature (139)..(139): n is a, c, g, or t
  misc_feature (299)..(299): n is a, c, g, or t
  misc_feature (331)..(331): n is a, c, g, or t

SEQ ID NO: 2555 - DNA, 241 bp, Mus musculus
  misc_feature (59)..(59): n is a, c, g, or t
  misc_feature (133)..(133): n is a, c, g, or t
  misc_feature (135)..(135): n is a, c, g, or t
  misc_feature (145)..(145): n is a, c, g, or t
agagaattttccagtagtcattctctactgagaaaagccaccttccttctgtcagtctntggtacaagttctgaggaaatccatgtttttgcatggaatagtaatagcagttattttcagaaaggcactggantntgcctctttngtctttgtaacagaatcttgcctctagcaataaaacccaataacagcccatctgctatatcttttggtagagaataaggttttctcaccattattg

SEQ ID NO: 2556 - DNA, 241 bp, Mus musculus; identical to SEQ ID NO: 2555
  misc_feature (59)..(59): n is a, c, g, or t
  misc_feature (133)..(133): n is a, c, g, or t
  misc_feature (135)..(135): n is a, c, g, or t
  misc_feature (145)..(145): n is a, c, g, or t

SEQ ID NO: 2557 - DNA, 113 bp, Mus musculus
aaacctgtcagaagccacagttggtcttcacttcttagcattgtcagtggtgggtatcaatgaatttgaataattttacttttaaaaaactgtagtcttgtagtatagcatac

SEQ ID NO: 2558 - DNA, 113 bp, Mus musculus; identical to SEQ ID NO: 2557

SEQ ID NO: 2559 - DNA, 254 bp, Mus musculus
gtgtgcctatgtgctgtaatactgggaggcaaaggaaagggccatggcgtccctttctgttaccaggagcatctaggcaggtcagaatgcaggccacatggaagacccagaccaagccttagagtgaggcctgagggtgtgttcttcagttcacggggtcacatcgtgtcactgttaactcagcagctggccttggctcttccctgtcacttctactgttcctagcccccagcatactccttggcacacagtaa

SEQ ID NO: 2560 - DNA, 254 bp, Mus musculus; identical to SEQ ID NO: 2559

SEQ ID NO: 2561 - DNA, 405 bp, Mus musculus
  misc_feature (45)..(45): n is a, c, g, or t
  misc_feature (48)..(48): n is a, c, g, or t
  misc_feature (71)..(90): n is a, c, g, or t
  misc_feature (108)..(137): n is a, c, g, or t
  misc_feature (143)..(157): n is a, c, g, or t
gtcctggaactatgacagcaactgcgtgttctgccgcgtggcggnggntcaggaacccaaaactgaactcnnnnnnnnnnnnnnnnnnnncctggtttgtttcaaagnnnnnnnnnnnnnnnnnnnnnnnnnnnnnntcgtcnnnnnnnnnnnnnnnattggaagttgcaaggatctaaacaaagatcacatagaaatggtcgagagcatggtggctgctgggaaaaccatgcttgagaggaataatttcactgacttcacagatgtaagaatgggtttccatgttcctccattctgttccatctctcatctgcaccttcatgtgatagcaccagtcaaagagtttggcttcttatcaaagctggtttacaggcaggattcctactggtttgtcacagttgatta

SEQ ID NO: 2562 - DNA, 405 bp, Mus musculus; identical to SEQ ID NO: 2561
  misc_feature (45)..(45): n is a, c, g, or t
  misc_feature (48)..(48): n is a, c, g, or t
  misc_feature (71)..(90): n is a, c, g, or t
  misc_feature (108)..(137): n is a, c, g, or t
  misc_feature (143)..(157): n is a, c, g, or t

SEQ ID NO: 2563 - DNA, 209 bp, Mus musculus
  misc_feature (47)..(47): n is a, c, g, or t
  misc_feature (53)..(53): n is a, c, g, or t
ctcctgtgagggatggaaaaggaactcaaacatcaaaatctacacanggaaantctaaaagaggatgtagaaaagcgccagtttcatctaagaccaacaggagacgccagattgctgggccagactctgaaagtgatcatgaaccaccatcagaaatgaagatgagattacccagacgagccaaaacagctgcgctacagaaaagtaaa

SEQ ID NO: 2564 - DNA, 209 bp, Mus musculus; identical to SEQ ID NO: 2563
  misc_feature (47)..(47): n is a, c, g, or t
  misc_feature (53)..(53): n is a, c, g, or t

SEQ ID NO: 2565 - DNA, 550 bp, Mus musculus
  misc_feature (329)..(331): n is a, c, g, or t
  misc_feature (333)..(334): n is a, c, g, or t
  misc_feature (337)..(338): n is a, c, g, or t
  misc_feature (340)..(340): n is a, c, g, or t
  misc_feature (346)..(346): n is a, c, g, or t
  misc_feature (354)..(354): n is a, c, g, or t
  misc_feature (358)..(358): n is a, c, g, or t
  misc_feature (360)..(361): n is a, c, g, or t
  misc_feature (418)..(418): n is a, c, g, or t
  misc_feature (463)..(477): n is a, c, g, or t
tccaagtagaatctgactggcaagctgcagcagcaagctcatggcgcttccatagacactgctttgaatgggagtcacacaactgacaggagcaccaggcagagctcggtgctgtcctggaagagtgcaggctagccgccaagtgccaagcttgggcctcattcctcactctccccaggtagctgaggcccttgagtaagcgtgtgctcccggctgctcactggtcaagcagctagaactacccagacacacccattgtagatgccaggttggcgttctgagcttcccaaacatctaaaccacgagggggagaaccccgcttgtgtccnnncnncanntncgggcngcttgccntccntnnaccctgagtcaattctagtgagcatggctccctggctgcctcctcacactgagcggngccatcccagttcaggaccatttctacttggatctccactctccnnnnnnnnnnnnnnngcctctgtagcaggaaaaggcatccatgggtgggatatatatatttatgtgactgcgggcatttgtggctata

SEQ ID NO: 2566 - DNA, 550 bp, Mus musculus; identical to SEQ ID NO: 2565
  misc_feature (329)..(331): n is a, c, g, or t
  misc_feature (333)..(334): n is a, c, g, or t
  misc_feature (337)..(338): n is a, c, g, or t
  misc_feature (340)..(340): n is a, c, g, or t
  misc_feature (346)..(346): n is a, c, g, or t
  misc_feature (354)..(354): n is a, c, g, or t
  misc_feature (358)..(358): n is a, c, g, or t
  misc_feature (360)..(361): n is a, c, g, or t
  misc_feature (418)..(418): n is a, c, g, or t
  misc_feature (463)..(477): n is a, c, g, or t

SEQ ID NO: 2567 - DNA, 314 bp, Mus musculus
  misc_feature (108)..(108): n is a, c, g, or t
cctgaactggagactgaagaagggttaagagacataaatgaacggctatgctcctggattctactgggtgactccatgtcagggtgacagacgactgccaccggaggnctggggcaaggatgcccaaatgagggatttgtggggaagtcctctagcttgctacattttattttgtcccaggttggagtccctgctctcccatctcccactggatgtgcagtgcttttgactatcttatgcatggtttagtcctctggcttggataacagtacccatagtcaattttcctatctaactttataggcaatacagtg

SEQ ID NO: 2568 - DNA, 314 bp, Mus musculus; identical to SEQ ID NO: 2567
  misc_feature (108)..(108): n is a, c, g, or t

SEQ ID NO: 2569 - DNA, 251 bp, Mus musculus
tctagccctcagtcgcttgtgcttacacatgcatgcacacaggacaaatgcacacacatgcagacacacgcgcacacacacacacatacacactcacacacataaatgagaataaagtttcaaaacactagttttgagaactgtgggtatagattcactggtagaatgtctcacatgcccaagacttggttacgatcccctgtattgcataaactgggcatggtggtgcacagctgtaatctcaatttgga

SEQ ID NO: 2570 - DNA, 251 bp, Mus musculus; identical to SEQ ID NO: 2569

SEQ ID NO: 2571 - DNA, 110 bp, Mus musculus
  misc_feature (64)..(64): n is a, c, g, or t
gcaagcagggacacctaatgccaccctgtgtgtacaaaccgttcagctcagctgattaacccancctggtgttaagggagagaggccagagctggtcttagaaaacacta

SEQ ID NO: 2572 - DNA, 110 bp, Mus musculus; identical to SEQ ID NO: 2571
  misc_feature (64)..(64): n is a, c, g, or t

SEQ ID NO: 2573 - DNA, 259 bp, Mus musculus
  misc_feature (26)..(26): n is a, c, g, or t
  misc_feature (32)..(32): n is a, c, g, or t
  misc_feature (35)..(35): n is a, c, g, or t
  misc_feature (45)..(45): n is a, c, g, or t
  misc_feature (64)..(64): n is a, c, g, or t
  misc_feature (87)..(87): n is a, c, g, or t
  misc_feature (93)..(93): n is a, c, g, or t
  misc_feature (142)..(142): n is a, c, g, or t
  misc_feature (152)..(152): n is a, c, g, or t
  misc_feature (155)..(155): n is a, c, g, or t
ctgcccaaggacctttgcttgggccntgcagnganacagaggttntggcacacgggctaggttntcagggagcctcccagccttctntcaaantcctagaccccacgctcaaccccacctctgcttagcagttaccgacagnactgccattntcntgggccagcacaggtggctgggtggctcaggaacaaatactgtgaggttccgagtggctctgtgtgccctcagtgtttgctgaataaacgaactgcccaaagta

SEQ ID NO: 2574 - DNA, 259 bp, Mus musculus; identical to SEQ ID NO: 2573
  misc_feature (26)..(26): n is a, c, g, or t
  misc_feature (32)..(32): n is a, c, g, or t
  misc_feature (35)..(35): n is a, c, g, or t
  misc_feature (45)..(45): n is a, c, g, or t
  misc_feature (64)..(64): n is a, c, g, or t
  misc_feature (87)..(87): n is a, c, g, or t
  misc_feature (93)..(93): n is a, c, g, or t
  misc_feature (142)..(142): n is a, c, g, or t
  misc_feature (152)..(152): n is a, c, g, or t
  misc_feature (155)..(155): n is a, c, g, or t

SEQ ID NO: 2575 - DNA, 366 bp, Mus musculus
  misc_feature (26)..(26): n is a, c, g, or t
  misc_feature (67)..(73): n is a, c, g, or t
  misc_feature (78)..(80): n is a, c, g, or t
  misc_feature (82)..(83): n is a, c, g, or t
  misc_feature (85)..(86): n is a, c, g, or t
  misc_feature (88)..(91): n is a, c, g, or t
  misc_feature (93)..(96): n is a, c, g, or t
ctttcctcttgagaagagcagaggangtctgaacccctacttactctgggagtggggaaggaacacnnnnnnnggaannnanngnngnnnnannnnccaacgtttttctaaacttaatccacagggagaaggggagtagccgggacaagagcaatgtgttccttccctattcttcagtacccacacacattaaaccagagaacagttagacgtagccctctgccctttccttgtcctgtggggctgtggacacagagaagagtccgcacgaacccgctctgggagtcctcaaggcagagaagactactttccttcctcttaaaataggagaacccagtcgggagctagtgggctcgcctttaagtc

SEQ ID NO: 2576 - DNA, 366 bp, Mus musculus; identical to SEQ ID NO: 2575
  misc_feature (26)..(26): n is a, c, g, or t
  misc_feature (67)..(73): n is a, c, g, or t
  misc_feature (78)..(80): n is a, c, g, or t
  misc_feature (82)..(83): n is a, c, g, or t
  misc_feature (85)..(86): n is a, c, g, or t
  misc_feature (88)..(91): n is a, c, g, or t
  misc_feature (93)..(96): n is a, c, g, or t

SEQ ID NO: 2577 - DNA, 405 bp, Mus musculus
  misc_feature (221)..(221): n is a, c, g, or t
  misc_feature (224)..(224): n is a, c, g, or t
  misc_feature (226)..(226): n is a, c, g, or t
  misc_feature (232)..(232): n is a, c, g, or t
  misc_feature (256)..(256): n is a, c, g, or t
agcttcagtcggaggctcccaggtgaaatcgtcgacatctagagaaaacaggcacaggagatagagagagctgcctcccgcaccccgcggccactgcccaaacatcccaagcgcatacctgcaccgttcaaggccatgttgccgtggtcactgctgggctcaccggaagtgatccaaataagatgcgcccccactacggccccgcctcccacatgtggtanctnanggcggnaagtgacgcttacacggtcttccnggcgctttagtcaaagggggggcgtgtctgctgcacatttgaccctgacctacgggctcggctggtggccagagctatggttgggtaccaccgtctccctggtaacgcttcagtactcgggtgtggcttttcagagtctccatttctac

SEQ ID NO: 2578 - DNA, 405 bp, Mus musculus; identical to SEQ ID NO: 2577
  misc_feature (221)..(221): n is a, c, g, or t
  misc_feature (224)..(224): n is a, c, g, or t
  misc_feature (226)..(226): n is a, c, g, or t
  misc_feature (232)..(232): n is a, c, g, or t
  misc_feature (256)..(256): n is a, c, g, or t

SEQ ID NO: 2579 - DNA, 474 bp, Mus musculus
  misc_feature (334)..(334): n is a, c, g, or t
  misc_feature (336)..(338): n is a, c, g, or t
  misc_feature (340)..(341): n is a, c, g, or t
  misc_feature (344)..(345): n is a, c, g, or t
  misc_feature (347)..(347): n is a, c, g, or t
  misc_feature (349)..(350): n is a, c, g, or t
  misc_feature (354)..(356): n is a, c, g, or t
  misc_feature (359)..(360): n is a, c, g, or t
  misc_feature (367)..(367): n is a, c, g, or t
cagtatctggatttacatgaccacaaaattctctactatttgagatttttttttgtatgattcatgtgcccctgtctttgtgctatagttaccaccaaacactcactatttctttagttagagatataaatctttcaaagatacttcagcacagtgacaaccttttgattcttaatactaaatcagtaggaagatattgcaactctcaaaggggagactaaatgggtagaatattcagtgtttacaggatattatcctatacttgcaagatcactttaatgctggaaaacagacctgagaaacgtgagatgagagagtaaagatctgtgatggnannngnngcnngnanngggnnncannctttggnaagctgagtcaggaggatggcaaaaacaagtacatgcataataacaaattatttaatgtgagtcctaggccccagatgtaaaaacacagccattttctctgtgagag

SEQ ID NO: 2580 - DNA, 474 bp, Mus musculus; identical to SEQ ID NO: 2579
  misc_feature (334)..(334): n is a, c, g, or t
  misc_feature (336)..(338): n is a, c, g, or t
  misc_feature (340)..(341): n is a, c, g, or t
  misc_feature (344)..(345): n is a, c, g, or t
  misc_feature (347)..(347): n is a, c, g, or t
  misc_feature (349)..(350): n is a, c, g, or t
  misc_feature (354)..(356): n is a, c, g, or t
  misc_feature (359)..(360): n is a, c, g, or t
  misc_feature (367)..(367): n is a, c, g, or t

SEQ ID NO: 2581 - DNA, 310 bp, Mus musculus
  misc_feature (80)..(80): n is a, c, g, or t
caaatacacaggatctggtcactttctgccataaataaagggcatgtgggcgcagggagggggtgccgcaggggaaaganccggtttcccttgtgtcctcgagccacgcgtggatcccacccttcagcccgagagcttgcccctgctcttccgaaccagaacctcagcacaaaccccactttcccacctcatttgtgcctctctgcggtcccctcccgggaaaaggatgaacaataaggacagcacgaagcgcacctgccccgtctccggtgaggaaggcgcgtgcgagcgcttacacagcgcggacgcg

SEQ ID NO: 2582 - DNA, 310 bp, Mus musculus; identical to SEQ ID NO: 2581
  misc_feature (80)..(80): n is a, c, g, or t

SEQ ID NO: 2583 - DNA, 556 bp, Mus musculus
  misc_feature (31)..(70): n is a, c, g, or t
  misc_feature (363)..(377): n is a, c, g, or t
  misc_feature (462)..(491): n is a, c, g, or t
caaccaacaaatgtttatggaaggactgatnnnnnnnnnnnnnnnnnnnnnnnnnnnnnnnnnnnnnnnncagtgtgtgtctcaatggatgtagatatcagccacctcggtgctcaacaggtattttatgatctccttgtttcaaattcatctagatgtagaactagggagagagcagtcacattgatgaaaggctaggactctttcagctcatggcttgtgtggaaggagggaaagcagaaatcacaacactctgagactactgtagtctgcagatacctgagtgggtgtggcttggcctttcaaaggacaaagagcaactaatgctgaaagcacatagtgtatctatacggcatggaatannnnnnnnnnnnnnntaaagagaactttggcaggtctgagcagcaaaatattgttgtttccattttacataaagggccctggagggctatagactattcnnnnnnnnnnnnnnnnnnnnnnnnnnnnnncatcttgattcaccctgtgcagactcttaagatctggccagttaccaacatgttctgtacagagt

SEQ ID NO: 2584 - DNA, 556 bp, Mus musculus; identical to SEQ ID NO: 2583
  misc_feature (31)..(70): n is a, c, g, or t
  misc_feature (363)..(377): n is a, c, g, or t
  misc_feature (462)..(491): n is a, c, g, or t

SEQ ID NO: 2585 - DNA, 343 bp, Mus musculus
  misc_feature (84)..(114): n is a, c, g, or t
  misc_feature (116)..(116): n is a, c, g, or t
  misc_feature (137)..(137): n is a, c, g, or t
  misc_feature (141)..(141): n is a, c, g, or t
  misc_feature (143)..(143): n is a, c, g, or t
  misc_feature (150)..(150): n is a, c, g, or t
  misc_feature (163)..(163): n is a, c, g, or t
  misc_feature (172)..(172): n is a, c, g, or t
  misc_feature (188)..(188): n is a, c, g, or t
  misc_feature (190)..(190): n is a, c, g, or t
  misc_feature (194)..(250): n is a, c, g, or t
  misc_feature (252)..(256): n is a, c, g, or t
  misc_feature (258)..(283): n is a, c, g, or t
tctgtcgccatgagcacctcgtctgcgcggcctgcagtcctggcccttgccgggctggctctgctccttctgctgtgcctgggnnnnnnnnnnnnnnnnnnnnnnnnnnnnnnnanagatgctccagaaacgagaangacntntcccgtncaaagactaatgntagctgtanccgagaacacagcaangnaatnnnnnnnnnnnnnnnnnnnnnnnnnnnnnnnnnnnnnnnnnnnnnnnnnnnnnnnnncnnnnngnnnnnnnnnnnnnnnnnnnnnnnnnntctacatgggctttgatgaggctaaatttgaagatgatgtcaactattggctaaacagaa

SEQ ID NO: 2586 - DNA, 343 bp, Mus musculus; identical to SEQ ID NO: 2585
  misc_feature (84)..(114): n is a, c, g, or t
  misc_feature (116)..(116): n is a, c, g, or t
  misc_feature (137)..(137): n is a, c, g, or t
  misc_feature (141)..(141): n is a, c, g, or t
  misc_feature (143)..(143): n is a, c, g, or t
  misc_feature (150)..(150): n is a, c, g, or t
  misc_feature (163)..(163): n is a, c, g, or t
  misc_feature (172)..(172): n is a, c, g, or t
  misc_feature (188)..(188): n is a, c, g, or t
  misc_feature (190)..(190): n is a, c, g, or t
  misc_feature (194)..(250): n is a, c, g, or t
  misc_feature (252)..(256): n is a, c, g, or t
  misc_feature (258)..(283): n is a, c, g, or t

SEQ ID NO: 2587 - DNA, 477 bp, Mus musculus
  misc_feature (29)..(59): n is a, c, g, or t
  misc_feature (61)..(61): n is a, c, g, or t
  misc_feature (82)..(82): n is a, c, g, or t
  misc_feature (86)..(86): n is a, c, g, or t
  misc_feature (88)..(88): n is a, c, g, or t
  misc_feature (95)..(95): n is a, c, g, or t
  misc_feature (108)..(108): n is a, c, g, or t
  misc_feature (117)..(117): n is a, c, g, or t
  misc_feature (133)..(133): n is a, c, g, or t
  misc_feature (135)..(135): n is a, c, g, or t
  misc_feature (139)..(195): n is a, c, g, or t
  misc_feature (197)..(201): n is a, c, g, or t
  misc_feature (203)..(228): n is a, c, g, or t
  misc_feature (299)..(333): n is a, c, g, or t
  misc_feature (363)..(382): n is a, c, g, or t
  misc_feature (393)..(393): n is a, c, g, or t
tggctctgctccttctgctgtgcctgggnnnnnnnnnnnnnnnnnnnnnnnnnnnnnnnanagatgctccagaaacgagaangacntntcccgtncaaagactaatgntagctgtanccgagaacacagcaangnaatnnnnnnnnnnnnnnnnnnnnnnnnnnnnnnnnnnnnnnnnnnnnnnnnnnnnnnnnncnnnnngnnnnnnnnnnnnnnnnnnnnnnnnnntctacatgggctttgatgaggctaaatttgaagatgatgtcaactattggctaaacagaaatcgaaacggnnnnnnnnnnnnnnnnnnnnnnnnnnnnnnnnnnnatgatgaagatgcggccattggtccccacnnnnnnnnnnnnnnnnnnnntggagccagtntcaactataatgactattaagcttcctgaggtgcccacagagcttgtgcctgcttcagtaggccttctctacctataccacgtg

SEQ ID NO: 2588 - DNA, 477 bp, Mus musculus; identical to SEQ ID NO: 2587
  misc_feature (29)..(59): n is a, c, g, or t
  misc_feature (61)..(61): n is a, c, g, or t
  misc_feature (82)..(82): n is a, c, g, or t
  misc_feature (86)..(86): n is a, c, g, or t
  misc_feature (88)..(88): n is a, c, g, or t
  misc_feature (95)..(95): n is a, c, g, or t
  misc_feature (108)..(108): n is a, c, g, or t
  misc_feature (117)..(117): n is a, c, g, or t
  misc_feature (133)..(133): n is a, c, g, or t
  misc_feature (135)..(135): n is a, c, g, or t
  misc_feature (139)..(195): n is a, c, g, or t
  misc_feature (197)..(201): n is a, c, g, or t
  misc_feature (203)..(228): n is a, c, g, or t
  misc_feature (299)..(333): n is a, c, g, or t
  misc_feature (363)..(382): n is a, c, g, or t
  misc_feature (393)..(393): n is a, c, g, or t

SEQ ID NO: 2589 - DNA, 448 bp, Mus musculus
  misc_feature (39)..(39): n is a, c, g, or t
  misc_feature (60)..(60): n is a, c, g, or t
  misc_feature (62)..(62): n is a, c, g, or t
  misc_feature (125)..(125): n is a, c, g, or t
  misc_feature (135)..(135): n is a, c, g, or t
  misc_feature (139)..(139): n is a, c, g, or t
  misc_feature (144)..(144): n is a, c, g, or t
  misc_feature (146)..(146): n is a, c, g, or t
  misc_feature (161)..(161): n is a, c, g, or t
  misc_feature (163)..(163): n is a, c, g, or t
  misc_feature (165)..(165): n is a, c, g, or t
  misc_feature (171)..(171): n is a, c, g, or t
  misc_feature (186)..(214): n is a, c, g, or t
  misc_feature (259)..(259): n is a, c, g, or t
  misc_feature (278)..(278): n is a, c, g, or t
  misc_feature (280)..(280): n is a, c, g, or t
taccctttgctttggaagcatacaaaaacgctgttttantctagtaatatgcatggaatntntccctttggagtgacgcattttgtgcattaaatttgggggagaaacttcatagagatcaatgnacatactttntttnttaantntgcttgtatattttntntntttcanataaatataaaccannnnnnnnnnnnnnnnnnnnnnnnnnnnnatatccatttcacctgtacattgtactgtgcaccccccccaactntcagccatcactaacattntnagaaaaaaaaaaaagaaaaagaagaaaaaaaaaagagagaaatcgaaaagcacaaaagaactgttttgttactttaagacaatgttactttttctagtagagcaagagaacattaacaaagctgcgactgtgcatgcccggatggatttcaacggttttcactagact

SEQ ID NO: 2590 - DNA, 448 bp, Mus musculus; identical to SEQ ID NO: 2589
  misc_feature (39)..(39): n is a, c, g, or t
  misc_feature (60)..(60): n is a, c, g, or t
  misc_feature (62)..(62): n is a, c, g, or t
  misc_feature (125)..(125): n is a, c, g, or t
  misc_feature (135)..(135): n is a, c, g, or t
  misc_feature (139)..(139): n is a, c, g, or t
  misc_feature (144)..(144): n is a, c, g, or t
  misc_feature (146)..(146): n is a, c, g, or t
  misc_feature (161)..(161): n is a, c, g, or t
  misc_feature (163)..(163): n is a, c, g, or t
  misc_feature (165)..(165): n is a, c, g, or t
  misc_feature (171)..(171): n is a, c, g, or t
  misc_feature (186)..(214): n is a, c, g, or t
  misc_feature (259)..(259): n is a, c, g, or t
  misc_feature (278)..(278): n is a, c, g, or t
  misc_feature (280)..(280): n is a, c, g, or t

SEQ ID NO: 2591 - DNA, 589 bp, Mus musculus
  misc_feature (31)..(31): n is a, c, g, or t
  misc_feature (110)..(110): n is a, c, g, or t
  misc_feature (113)..(113): n is a, c, g, or t
  misc_feature (138)..(138): n is a, c, g, or t
  misc_feature (213)..(231): n is a, c, g, or t
ttaacaggtgatgtaggggtcccctggttgnaagacagagtaggtgctgtaacagctgcaggggctgcctgcgtgctggaagtatgagcattgcttacagaagccatggnctntgtcttatctgtctctgcctctgantctgaatcgtcctcctcgtcctcctcactggaacagctcgactcgtccttcttgccttcttcctcctcatcagcnnnnnnnnnnnnnnnnnnntcgatgcgagatgcatttttctctggctcaataatcaacgtttccttgtttttaaaagccttctgtggttgattgttttccatatttgctgtggactcgatcagtggagatttcttatcccgcttctcactatggagcagagtttgttttttttgcaactcttctagatatcccaaaatgtcttcatctgctacatcaaaggctgtttggcccactttgttgaccgtctccatatcacacagattgtccactaaaatccgacatgcttcttctttaccccaatgagctgcagcatgaagaggtgtccagccatcataatctttaatattaacatcatagcctgcctgtattaaaagtt

SEQ ID NO: 2592 - DNA, 589 bp, Mus musculus; identical to SEQ ID NO: 2591
  misc_feature (31)..(31): n is a, c, g, or t
  misc_feature (110)..(110): n is a, c, g, or t
  misc_feature (113)..(113): n is a, c, g, or t
  misc_feature (138)..(138): n is a, c, g, or t
  misc_feature (213)..(231): n is a, c, g, or t

SEQ ID NO: 2593 - DNA, 500 bp, Mus musculus
  misc_feature (34)..(125): n is a, c, g, or t
  misc_feature (141)..(141): n is a, c, g, or t
  misc_feature (150)..(174): n is a, c, g, or t
  misc_feature (199)..(199): n is a, c, g, or t
  misc_feature (202)..(202): n is a, c, g, or t
  misc_feature (365)..(365): n is a, c, g, or t
  misc_feature (421)..(437): n is a, c, g, or t
gatcttttagtatttccaacttggggatgtttgnnnnnnnnnnnnnnnnnnnnnnnnnnnnnnnnnnnnnnnnnnnnnnnnnnnnnnnnnnnnnnnnnnnnnnnnnnnnnnnnnnnnnnnnnnnngaagaggggaaccctnaactgcagnnnnnnnnnnnnnnnnnnnnnnnnntgtcaagtgacagccgagtggttgntgntgaactagctaccaggtttcttgaaactttcaaagcaaacctagagaatcccatgcgacttgggtagccttcagagaccaggcgcttgattgggtgttcagtatggagtagatgaagtgcgtatttatttaaggcgaaagctttgacctgagctgtcttcctntcccctgtacatgtactgtagaaatgtgtgatgacaaacggactaataaagaacannnnnnnnnnnnnnnnnacttttaacctctggtgctgtacagaaggcattaaactaatgtaaactacatcctatgtttgg

SEQ ID NO: 2594 - DNA, 500 bp, Mus musculus; identical to SEQ ID NO: 2593
  misc_feature (34)..(125): n is a, c, g, or t
  misc_feature (141)..(141): n is a, c, g, or t
  misc_feature (150)..(174): n is a, c, g, or t
  misc_feature (199)..(199): n is a, c, g, or t
  misc_feature (202)..(202): n is a, c, g, or t
  misc_feature (365)..(365): n is a, c, g, or t
  misc_feature (421)..(437): n is a, c, g, or t

SEQ ID NO: 2595 - DNA, 512 bp, Mus musculus
  misc_feature (254)..(254): n is a, c, g, or t
gttgtcatagtgtgggcctcttgccatgtcagccgtgttgtcaggcataaggagttatctacgatgtaaacatgctttaaggacaagtgtgcgagtgcttggaagctttgcttttgatgtaacaggtaataactagttgttaatctttggaaaagtcagagtccttgaagtacaatcaagcctttattaactggagtacttaaagaataagctaataatggaattttgttccacaagggctaagcaacactttnaaaattctcttacttattgtattagtatactttcctatcctaaaattagaatgtgtaaaatgtggctccatcttagactgtagcatctcgcgaggccttcctgtcagcatccgggcgtaaatacccatgatgggtacaaggtgatactgaagctgagctgacacacactgaccttcagcgttcaggaaaactgctctgtggaatcaaatctgatgagttcttatggtcacttctcccttattgccaaaagtagatcgc

SEQ ID NO: 2596 - DNA, 512 bp, Mus musculus; identical to SEQ ID NO: 2595
  misc_feature (254)..(254): n is a, c, g, or t

SEQ ID NO: 2597 - DNA, 421 bp, Mus musculus
  misc_feature (90)..(90): n is a, c, g, or t
  misc_feature (93)..(93): n is a, c, g, or t
  misc_feature (144)..(144): n is a, c, g, or t
  misc_feature (222)..(222): n is a, c, g, or t
  misc_feature (261)..(261): n is a, c, g, or t
  misc_feature (320)..(320): n is a, c, g, or t
  misc_feature (326)..(326): n is a, c, g, or t
  misc_feature (330)..(330): n is a, c, g, or t
  misc_feature (332)..(332): n is a, c, g, or t
  misc_feature (394)..(394): n is a, c, g, or t
  misc_feature (396)..(396): n is a, c, g, or t
tagagtctgaccatcagacccacattaaaaaagtcaggcgtagtggtcaaagcttgtagcccagcatccacacaaatatatgtctgtagntanatacataagaataagtaatagatgtgaaaagtaccccctggtccagccacngaagcaacagggtgctcagggcattggggaacagtcctggtgtgccacagcccctgggtacccttctcagctggcagntggcacctttcacaggtttcagaacagtctatctcccanctcagcacctgttgtccaagcctcccagggccatggctaatttacatttcatttgtatncccccncccncncacaagaacagagcattggtctaggtgcacagtcctgcctacttacacaaccagccagaggntnctggtccttcaggaggaactgagtc

SEQ ID NO: 2598 - DNA, 421 bp, Mus musculus; identical to SEQ ID NO: 2597
  misc_feature (90)..(90): n is a, c, g, or t
  misc_feature (93)..(93): n is a, c, g, or t
  misc_feature (144)..(144): n is a, c, g, or t
  misc_feature (222)..(222): n is a, c, g, or t
  misc_feature (261)..(261): n is a, c, g, or t
  misc_feature (320)..(320): n is a, c, g, or t
  misc_feature (326)..(326): n is a, c, g, or t
  misc_feature (330)..(330): n is a, c, g, or t
  misc_feature (332)..(332): n is a, c, g, or t
  misc_feature (394)..(394): n is a, c, g, or t
  misc_feature (396)..(396): n is a, c, g, or t

SEQ ID NO: 2599 - DNA, 405 bp, Mus musculus
ggttaatgtcctaacagctacttcattgtttactcatgagaacccagctagtaaatattgatgttcagggctgctggcttgcacagtccttggggttctgttcacatagaacacaatttggagttcatcaaacactgttgcactttgattcatacttccaaatgattttcattggacgctcacattctgtcatttagacggaatgcgcttattgtgccctttccactgttcttagataatattgtcatttcagtgagaattgagactgattctctctgcaggatacacctctggtttttgtcactgagaagccattgatctgcaaagtatatccttttctcttcctttgactggttccaaatacagtggtgtgtcttcatctgttacacatgctactgcagcatt

SEQ ID NO: 2600 - DNA, 405 bp, Mus musculus; identical to SEQ ID NO: 2599

SEQ ID NO: 2601 - DNA, 480 bp, Mus musculus
  misc_feature (186)..(186): n is a, c, g, or t
  misc_feature (427)..(427): n is a, c, g, or t
gttgatgctcacaactgttattaatttctgcttacgaaatggcttttctcatgttccccggtgctttggtaggttctggctacatttgctaatcgtttcaacttaacctttcttgggaacttgtagactaggagggcagaaccatgcagtcttctactctgatataatcagaaaataattgtgttncgaagctttggggctgtgggtagacagaacagctttcttcaggcctggtgcgagtttacgaactgagggtgcttttccctccaaccttttgttataagacttgcttcattttattttcttaagaaaactacatctgaggtttccctttcccctctcctctgcttttttgtgctcttgtctgctctaaccaccaacatgaacaccatttttccccctctcttctctttatgatgccgagganagtaatagagacattgctgctttctcccctgtcggccttgcttcctcaggctg

SEQ ID NO: 2602 - DNA, 480 bp, Mus musculus; identical to SEQ ID NO: 2601
  misc_feature (186)..(186): n is a, c, g, or t
  misc_feature (427)..(427): n is a, c, g, or t

SEQ ID NO: 2603 - DNA, 567 bp, Mus musculus
  misc_feature (207)..(325): n is a, c, g, or t
  misc_feature (457)..(457): n is a, c, g, or t
cttaaaacaagctgagcaaagattagagtcatattcaaattctacccatattaatttacttaatgaagactagaggatcaatgtatactcaattgtgagctttattagccttgcatccacttttatcactaatttgtagttcagagtttgtatagtagaattaaattgcttctgtgcgtgcaaacaaaaatttggtccttaatatgnnnnnnnnnnnnnnnnnnnnnnnnnnnnnnnnnnnnnnnnnnnnnnnnnnnnnnnnnnnnnnnnnnnnnnnnnnnnnnnnnnnnnnnnnnnnnnnnnnnnnnnnnnnnnnnnnnnnnnnaaaaaaatcttttttgtggttgatgaatatatccatctaataaaaatttcatttttattatatgcccacctttaaaaaaaaaaaaacctcactctgtagacatagaggagaaccattttgagacaaggtctntacgtaactcatgttggcctcagactagctgagaatcaaggcctctactactgatcctctgtctcagttccttagtgctagggttacaagcaagcccagagatggttgtt

SEQ ID NO: 2604 - DNA, 567 bp, Mus musculus; identical to SEQ ID NO: 2603
  misc_feature (207)..(325): n is a, c, g, or t
  misc_feature (457)..(457): n is a, c, g, or t

SEQ ID NO: 2605 - DNA, 395 bp, Mus musculus
caagtttcaggatcatgagaaactatttctaaaacaaaaccctaaaaataatgaaaactttggcgttttattaatacttttaaagtgtaggctatgtggtttagtcattctgtgttccatataaagcttctgcatgtcagttaagcaacactggttgtattactgcctttctgcccttggaatactgtttaagttgattgcagcgtttctttgtctttgctttatggttttatctgtagttaagtatttggacagggctctgttatatcttccttacaaaaattttaaatgattatttcttaatgcttttgcattatcaagagttaatatgataacctatacatgtatatttgaagcacaactgtatccatgaaataccaagtatattccatgtg

SEQ ID NO: 2606 - DNA, 395 bp, Mus musculus; identical to SEQ ID NO: 2605

SEQ ID NO: 2607 - DNA, 160 bp, Mus musculus
atattcccactgtcctctgtgtctgccatgttggagtgtggtgcagggctttgtgggcccactgtggtcctaaatgatctggatccgtgtataataaatccattgtgcatatttgttcatgtgtttctgggagaagcaactttgtgtcattcatgttccc

SEQ ID NO: 2608 - DNA, 160 bp, Mus musculus; identical to SEQ ID NO: 2607

SEQ ID NO: 2609 - DNA, 236 bp, Mus musculus
cactgtcctctgtgtctgccatgttggagtgtggtgcagggctttgtgggcccactgtggtcctaaatgatctggatccgtgtataataaatccattgtgcatatttgttcatgtgtttctgggagaagcaactttgtgtcattcatgttcccaccttaaatttttagagtgtttttaatccttgaaaacaaaaagcatcttattttgtatataagactcatccagttttggtttt

SEQ ID NO: 2610 - DNA, 236 bp, Mus musculus; identical to SEQ ID NO: 2609

SEQ ID NO: 2611 - DNA, 529 bp, Mus musculus
  misc_feature (248)..(343): n is a, c, g, or t
ctttggcttgaggatttggtccagagtgggatggagtgagtgcttctgcctctgaatgccggacaggacacagagactgactctgacggagacatcattctacagcgagaggacacaatatccaaaggtgttccaaaggggaatgccagttctctgactgcatgggcttactgtagacaaggcagtcctgagacaggatttcagaaagctaaaaaaatggggcgggcaagatggctcatcatggagcnnnnnnnnnnnnnnnnnnnnnnnnnnnnnnnnnnnnnnnnnnnnnnnnnnnnnnnnnnnnnnnnnnnnnnnnnnnnnnnnnnnnnnnnnnnnnnnnaccccagttcgagggactccaacaggcacacacatggtctatatatgtgtatgcaggaaaacatccaaccccataaagtaaaataaccttaagaaaaaaataagatggctcagcagttaaaggcactgtccccaggcctggtgacatgactttggtccccagtacccacatagtggaaggacaagt

SEQ ID NO: 2612 - DNA, 529 bp, Mus musculus; identical to SEQ ID NO: 2611
  misc_feature (248)..(343): n is a, c, g, or t

SEQ ID NO: 2613 - DNA, 430 bp, Mus musculus
  misc_feature (26)..(26): n is a, c, g, or t
  misc_feature (29)..(38): n is a, c, g, or t
  misc_feature (40)..(40): n is a, c, g, or t
  misc_feature (303)..(403): n is a, c, g, or t
tctcagtgggaatctccgaggctctnagnnnnnnnnnnanaaatcaacatattgaagggtagagatgtctgtagcaaggtttctgctgtgacaaatcacggatggatgctgtctccatttagtgcctagaaattaacttacactagtcaagtcaatttgctactgtgaaatcatgcactcttgttgaagtctttcaaagcttccatatccacctgacagctgccacctccctgtcatctagaattctcttcatgaacctctatgctaaagatcagtgtctacatcaaagtcttataaactgtnnnnnnnnnnnnnnnnnnnnnnnnnnnnnnnnnnnnnnnnnnnnnnnnnnnnnnnnnnnnnnnnnnnnnnnnnnnnnnnnnnnnnnnnnnnnnnnnnnnnnactgtcacaaaaccatgtgtctaaacg

SEQ ID NO: 2614 - DNA, 430 bp, Mus musculus; identical to SEQ ID NO: 2613
  misc_feature (26)..(26): n is a, c, g, or t
  misc_feature (29)..(38): n is a, c, g, or t
  misc_feature (40)..(40): n is a, c, g, or t
  misc_feature (303)..(403): n is a, c, g, or t

SEQ ID NO: 2615 - DNA, 563 bp, Mus musculus
  misc_feature (37)..(39): n is a, c, g, or t
  misc_feature (41)..(41): n is a, c, g, or t
  misc_feature (43)..(44): n is a, c, g, or t
  misc_feature (46)..(46): n is a, c, g, or t
  misc_feature (64)..(64): n is a, c, g, or t
  misc_feature (159)..(173): n is a, c, g, or t
  misc_feature (251)..(251): n is a, c, g, or t
  misc_feature (356)..(356): n is a, c, g, or t
  misc_feature (364)..(364): n is a, c, g, or t
  misc_feature (456)..(463): n is a, c, g, or t
  misc_feature (467)..(467): n is a, c, g, or t
  misc_feature (469)..(485): n is a, c, g, or t
tgaagaccaaggagacccccaagggtaccactgcctnnngncnncngagagaacctgcctcccncccagaagtcacagcacctgcttctcagctcctcatgtgtgcatgtgtgccagagcgccaggcagggtggttgcctcatcacctcatggccaatnnnnnnnnnnnnnnnctggatggaatagagaagggtcctgtggagttccaggccctggctgcaatgctccacacacacacacacccctcttgnccaggtggcctcttgtcctctgctcttgactctgccagccctgattttctgggctgggctcactggctctcaatgccaccttcgttaggattcatgaaatgagtncctgtccntcctggtcatgctggcctccgaggcgcgggctgggatctgtcaggctgcgtatttattaagtttggctattctataaagacttgtatatacnnnnnnnnaaanannnnnnnnnnnnnnnnncgccctctcttccctgttcctctgggctggagggggcggtggggagggggaggacggggctacgtcttgccagctgta

SEQ ID NO: 2616 - DNA, 563 bp, Mus musculus; identical to SEQ ID NO: 2615
  misc_feature (37)..(39): n is a, c, g, or t
  misc_feature (41)..(41): n is a, c, g, or t
  misc_feature (43)..(44): n is a, c, g, or t
  misc_feature (46)..(46): n is a, c, g, or t
  misc_feature (64)..(64): n is a, c, g, or t
  misc_feature (159)..(173): n is a, c, g, or t
  misc_feature (251)..(251): n is a, c, g, or t
  misc_feature (356)..(356): n is a, c, g, or t
  misc_feature (364)..(364): n is a, c, g, or t
  misc_feature (456)..(463): n is a, c, g, or t
  misc_feature (467)..(467): n is a, c, g, or t
  misc_feature (469)..(485): n is a, c, g, or t

SEQ ID NO: 2617 - DNA, 276 bp, Mus musculus
  misc_feature (91)..(91): n is a, c, g, or t
  misc_feature (148)..(162): n is a, c, g, or t
  misc_feature (224)..(248): n is a, c, g, or t
ctcagtttgtctgcaactgtttattttactgggctctgtacttcaacccaattattaacattgatctggtggtcaaggaagtccgacggcnggaaacccaagtgttatgatgggcagcaaggcccgagcgagcccgtgaatctacctnnnnnnnnnnnnnnnacattcaaagagacaagggactcgtttctacccctggtaatgcgaggtgctgcttctgtgtnnnnnnnnnnnnnnnnnnnnnnnnntcctctgactctggcaccatgccagctg

SEQ ID NO: 2618 - DNA, 276 bp, Mus musculus; identical to SEQ ID NO: 2617
  misc_feature (91)..(91): n is a, c, g, or t
  misc_feature (148)..(162): n is a, c, g, or t
  misc_feature (224)..(248): n is a, c, g, or t

SEQ ID NO: 2619 - DNA, 430 bp, Mus musculus
  misc_feature (286)..(287): n is a, c, g, or t
  misc_feature (303)..(303): n is a, c, g, or t
tcagctcttagagaattgaatcagattgaggcggaactgaataaatattggcagcggttgttagaagggctttcttactacaaacctcccagtccaagttcagctgaaagagtgaaagctaataaagacgtagcgtcacctctgaaggagctgggcctaagagtcagcaagttcttgggtcttgatgaagagcagagtgtgcagttactgcagtgttaccttcaggaggattacaggggtactcgggactcactaaagacagtcctgcaagatgagaggcagagcnnggccttaaccctgaangggccttcgttgggttcctggcacccgtggcagctcaggaatgccttacctctggctccagatccctccttgcccttcttcttctggccttggtaggcacctgtacacatgtggtatacacaaacaa

SEQ ID NO: 2620 - DNA, 430 bp, Mus musculus; identical to SEQ ID NO: 2619
  misc_feature (286)..(287): n is a, c, g, or t
  misc_feature (303)..(303): n is a, c, g, or t

SEQ ID NO: 2621 - DNA, 250 bp, Mus musculus
tttgccttacacagcattgttgagctcaacttgtgatagcagtgccattgaaacacatacacctcaagtactgctctcagggttcccgtggcagcttgccgcttctgcaacctcaccttaggtggttggcttgcctggtggtttcttcaggattgaactacctctgccttgtgtctgcttgctgaaaggtctggactgtaactaccagttcgtgcctggtgtctgcctgcttagagcagtggtctgctgt

SEQ ID NO: 2622 - DNA, 250 bp, Mus musculus; identical to SEQ ID NO: 2621

SEQ ID NO: 2623 - DNA, 235 bp, Mus musculus
ggtctctgccatagaatttgtgcacctgagagttcctggtcttgagttatggagagcaagcactggtttctacttcataggattcacaatggagagggctaggaagatactggacaattttcagcagtgtgacactcaagtcctggtcccttggagagaaaggacgcggtgttcaagaagtaatctcatcaaaatcagagtcaatgagaccttacatacagaagacatgaggtct

SEQ ID NO: 2624 - DNA, 235 bp, Mus musculus; identical to SEQ ID NO: 2623

SEQ ID NO: 2625 - DNA, 560 bp, Mus musculus
  misc_feature (126)..(126): n is a, c, g, or t
  misc_feature (193)..(193): n is a, c, g, or t
  misc_feature (316)..(316): n is a, c, g, or t
  misc_feature (332)..(332): n is a, c, g, or t
  misc_feature (350)..(350): n is a, c, g, or t
agaccagtgagttggttacacagattgatacataggagacatttcttttgttaaaactatgaagtgtgttacaaactaaaaggctctgggttgttggtacagtgtgaatgttggcagggcatagcntaaaatggaatttgccccttgggatgttgagtctaactcaggctgaggaccaggctcaggccacgcntaagcttcccttctcttcaatgctggctgttttcggcccccagttccatccgagggcctggagctgcaggaagaagccagagccatctatgatctcagttcaacaggccccataagactcacntagcagaaaaccaacnaaagacacacgtgtcatntaatacttgatacatttaagtcaattctgtgtctaaatttttgctgtgtcctaatgtttcaggatattaattcaatgtgcctttttttgaccccccctccatttcagtatactatgcacatttttatttctgttacaaatttttaattgcctagggttagagagagagctcagtggtaaatgtttgtattgtatacactagtcctcaggc

SEQ ID NO: 2626 - DNA, 560 bp, Mus musculus; identical to SEQ ID NO: 2625
  misc_feature (126)..(126): n is a, c, g, or t
  misc_feature (193)..(193): n is a, c, g, or t
  misc_feature (316)..(316): n is a, c, g, or t
  misc_feature (332)..(332): n is a, c, g, or t
  misc_feature (350)..(350): n is a, c, g, or t

SEQ ID NO: 2627 - DNA, 373 bp, Mus musculus
atgtgggcattcttgatacttcaagttctagtttgaaaaatacataactaatttaattttacacaaaaatatttatgcagattttcagactttcatatcaggaaataacctttttatgtctgttaaatatccaaacaatttgctaccgtgttaatctgcatggtcttctcgcctgctgtagttgccttgcaggtgtctcataaagtggaccgatgggatggagtcatgctgcccaaactcagaggagcatgcagggatccggtagcctagcaagagtcagattcctgattttagaatacaaaatgccaacttaattgttgtatatggttgtacaaatagattctgtaccttcctctgaagagggcagagaaga

SEQ ID NO: 2628 - DNA, 373 bp, Mus musculus; identical to SEQ ID NO: 2627

SEQ ID NO: 2629 - DNA, 436 bp, Mus musculus
  misc_feature (62)..(62): n is a, c, g, or t
  misc_feature (97)..(97): n is a, c, g, or t
  misc_feature (224)..(224): n is a, c, g, or t
  misc_feature (275)..(275): n is a, c, g, or t
cagtggtctatcattctgaggatagaaagggacatagtgttatatgaatgccaatcattttntacatgtaagtaggtaggacttttgcttttctatnctttcctccttttgtcttttatgaggtagcgtcagttaaggacagttggtcactccttttctgtgggttatgtaggtgacctttcttccacaaataaaagacacttaagctctccatgccccacatntcattcctttatcaaaggtaagcctcctagtcatgtcttagatctacaggntgaaatctagagctgactgatgaaaaagaattagctccaggactctatccctgccaggggagaagagggagctatttatcctatttttctttaacttttgttttatgttaacatattatatcttcaaaacatcaatgattcctctgccttttgaaagtaaa

SEQ ID NO: 2630 - DNA, 436 bp, Mus musculus; identical to SEQ ID NO: 2629
  misc_feature (62)..(62): n is a, c, g, or t
  misc_feature (97)..(97): n is a, c, g, or t
  misc_feature (224)..(224): n is a, c, g, or t
  misc_feature (275)..(275): n is a, c, g, or t

SEQ ID NO: 2631 - DNA, 450 bp, Mus musculus
  misc_feature (89)..(89): n is a, c, g, or t
  misc_feature (401)..(401): n is a, c, g, or t
ttaaaatgtagatttcctggccttcctagttaacaaggatttttaaacatttgatttcttaaaatacatttttcttaagagctgagacntatataaagatggtctcatcccatttccttgaagtgaaactcacatctaacaaaacagctataaatactcagtatttcttttttgcagttcacaataggtactagtttaaagagatgagaatgtattgactatgctatgaaataaaaatttatcaataattacccagtatgtggcatttagataatgggtaataaccatagccaaaggacctggtttctgcaatcttcttaggaaagtcataagaatgatgtcatagaacttaaactgttagtaagtgagtaagttttattaatatgttcatttgtattatnctgtatgtatgaaataaagtttcactgtttgtggcctctagtaaattct

SEQ ID NO: 2632 - DNA, 450 bp, Mus musculus; identical to SEQ ID NO: 2631
  misc_feature (89)..(89): n is a, c, g, or t
  misc_feature (401)..(401): n is a, c, g, or t

SEQ ID NO: 2633 - DNA, 253 bp, Mus musculus
ttgaactttgagtcggcattctgttttgtcttcaccttcctcacatgcttttggggtgcatcattttaatgtgttgtttatttaatattcactgaagcaagagttctcaagctttatgggtctgttccccacacaccagcactcaaatcaaacaatattgtgcttgtataactttctatgggaagtctagagactttacagatagtccagaaagtctcaaggctggaggagcatgaggcctttcatccctttg

SEQ ID NO: 2634 - DNA, 253 bp, Mus musculus; identical to SEQ ID NO: 2633

SEQ ID NO: 2635 - DNA, 614 bp, Mus musculus
  misc_feature (319)..(441): n is a, c, g, or t
ctttgtgcttgcagttaaaaacatgagcaactcagtttcaccttcagccaccatgcctgctgcttccctaccatgatggactctcttacccttctggaatggtaagctaaataaactttttcttctacaaagtgccttgatcatgttgttttactaccacactggaaaagtaactacaaaatcatttaacaacaggatcaagatttctgctttgtttaactttataaattatatctaaaatctgcttctcacctgtgtattccatctcagatatgacatctcaaagagattcaattacttcccaccataaaatattcannnnnnnnnnnnnnnnnnnnnnnnnnnnnnnnnnnnnnnnnnnnnnnnnnnnnnnnnnnnnnnnnnnnnnnnnnnnnnnnnnnnnnnnnnnnnnnnnnnnnnnnnnnnnnnnnnnnnnnnnnnaaaccaaaaccaaaaaaaaagaaagaaagaaaaaaatattcatttacaacttctataaagtatatggagatctcaacactataccttatataaggttttccccatttctactgctactcttatggttcaatttaatatttcacctcaatttaaaagggcaagcccataaagag

SEQ ID NO: 2636 - DNA, 614 bp, Mus musculus; identical to SEQ ID NO: 2635
  misc_feature (319)..(441): n is a, c, g, or t

SEQ ID NO: 2637 - DNA, 474 bp, Mus musculus
  misc_feature (270)..(270): n is a, c, g, or t
  misc_feature (363)..(363): n is a, c, g, or t
  misc_feature (372)..(372): n is a, c, g, or t
  misc_feature (374)..(374): n is a, c, g, or t
  misc_feature (411)..(411): n is a, c, g, or t
gaatagcccttctagcagaggaagcagcaagaatttctaataataacaaagcaggccttcatatcctaaaataacaggattaaagggaaggggggtcacagaagtgggagctttcctggcctcactatgactattcctccttggagctgattgtgattcaagaagtggcattctttcttgttttgaatattggccataaataaaggcactttcagaaagaagacagtgacatctacctcagatgtggctgtgctctgcctctggagcganaataatgggcattgtgttaggactagcagggcgtccagggagcttcattccaaatctcatggactcatttattcagcgggtatgtacaggcanatggttcananacgtgcaaggtacagtgggtggggctggagtagactnaaggaggtttaggatatagggctgaacattttctctcaaaactttgccatcagatgaggtgag

SEQ ID NO: 2638 - DNA, 474 bp, Mus musculus; identical to SEQ ID NO: 2637
  misc_feature (270)..(270): n is a, c, g, or t
  misc_feature (363)..(363): n is a, c, g, or t
  misc_feature (372)..(372): n is a, c, g, or t
  misc_feature (374)..(374): n is a, c, g, or t
  misc_feature (411)..(411): n is a, c, g, or t

SEQ ID NO: 2639 - DNA, 548 bp, Mus musculus
  misc_feature (26)..(26): n is a, c, g, or t
  misc_feature (47)..(47): n is a, c, g, or t
  misc_feature (59)..(59): n is a, c, g, or t
  misc_feature (381)..(381): n is a, c, g, or t
  misc_feature (390)..(390): n is a, c, g, or t
  misc_feature (412)..(413): n is a, c, g, or t
  misc_feature (416)..(416): n is a, c, g, or t
  misc_feature (446)..(446): n is a, c, g, or t
  misc_feature (448)..(448): n is a, c, g, or t
  misc_feature (495)..(495): n is a, c, g, or t
  misc_feature (517)..(517): n is a, c, g, or t
cacaagtcacattccagcctaagtgnctcagctcatcaaaaacttgnacatggcaatcntacgggtggtagatggttttctatcttatgtcacatatgccttggaagctgtcatcaaagtgtgagagccagatctttttcttagctgttacacatacctcagtgctgaaagacttgattttgtagcttggtacctcagcgttgacttaggtgctccactagcccacctttctctaagaattgaagtctgtagtctatctccaaggcactggaggtagggtcagtgatctaacacaaccttgaacttgactgattctctcaggcatttcttaccagcttggtggcacttaagcaatatccttgtccaacagtcaccaaaatntcatgattnttaacacttgtgcttgagctgnnttntgtgctatatctgcttgggcccatgaggcncngccctgaggctacatgtacaaccagactaacctgtgaaaaggctctntcagacacaggtgtccctgctnttagtactacttgggttatggtaggcaggac

SEQ ID NO: 2640 - DNA, 548 bp, Mus musculus; identical to SEQ ID NO: 2639
  misc_feature (26)..(26): n is a, c, g, or t
  misc_feature (47)..(47): n is a, c, g, or t
  misc_feature (59)..(59): n is a, c, g, or t
  misc_feature (381)..(381): n is a, c, g, or t
  misc_feature (390)..(390): n is a, c, g, or t
  misc_feature (412)..(413): n is a, c, g, or t
  misc_feature (416)..(416): n is a, c, g, or t
  misc_feature (446)..(446): n is a, c, g, or t
  misc_feature (448)..(448): n is a, c, g, or t
  misc_feature (495)..(495): n is a, c, g, or t
  misc_feature (517)..(517): n is a, c, g, or t

SEQ ID NO: 2641 - DNA, 179 bp, Mus musculus
  misc_feature (51)..(52): n is a, c, g, or t
  misc_feature (55)..(55): n is a, c, g, or t
  misc_feature (59)..(60): n is a, c, g, or t
  misc_feature (63)..(64): n is a, c, g, or t
  misc_feature (73)..(73): n is a, c, g, or t
  misc_feature (79)..(79): n is a, c, g, or t
gcccacagactgcaccggttttgctcgcggagggagatgtcctggggactnntcntctnntgnnttccgaaantgaaancctgcggactaaacagacccaaaataaggagcttcccacttgcccgggtcacttgaagggctttcgcatccaccacgaagtacaacatacaacttccgag

SEQ ID NO: 2642 - DNA, 179 bp, Mus musculus; identical to SEQ ID NO: 2641
  misc_feature (51)..(52): n is a, c, g, or t
  misc_feature (55)..(55): n is a, c, g, or t
  misc_feature (59)..(60): n is a, c, g, or t
  misc_feature (63)..(64): n is a, c, g, or t
  misc_feature (73)..(73): n is a, c, g, or t
  misc_feature (79)..(79): n is a, c, g, or t

SEQ ID NO: 2643 - DNA, 498 bp, Mus musculus
  misc_feature (426)..(426): n is a, c, g, or t
catggctccttgtgtgattagaaatgtggaatatatttatctctcgggcccctttgctcaaaactgtctgaagtcttgtgtgcctgatggagttgtttgcacagtttaaaacataagcaaggcagccattgaaaagagatcgtcctcgggcctcagcttcatacacgttccctcggtagcctccctgtgaggaaggatgcgggtctccaaataaagatgcagtgtttattttgagcttggaatcttaatgagatgatctgaacacctctcttttgtatcaataaatagtcctgttattctaaaatgagagggccaaagacagcaaaacccttgacagctcaatgcggaatgaataggagacagcaggccagcagtccttacacacatatgcacatgctggatctccaatcccacctgtggcatctntgaaacaacatggagacaatgttgctggcacccacttcctaaggaagaatagtaacccgtggactgctcagt

SEQ ID NO: 2644 - DNA, 498 bp, Mus musculus; identical to SEQ ID NO: 2643
  misc_feature (426)..(426): n is a, c, g, or t

SEQ ID NO: 2645 - DNA, 274 bp, Mus musculus
  misc_feature (54)..(54): n is a, c, g, or t
tccctactcgaggaagccccggagtcccgccgcttggtgagggtgtgtgtccanccgactgcggccctcagaacccccaaatggaggccagggctgaagatggaaaacggaagcagtaagtgaagatggcaacactgcccacgaccacagccgcacgtaaaaataactgctggagcacagcgcccaggacgaggtatgggaaatgagcacgtggctctgagagcctgcctggtattcctgctcatctccagaccttcagcagagaccagccagg

SEQ ID NO: 2646 - DNA, 274 bp, Mus musculus; identical to SEQ ID NO: 2645
  misc_feature (54)..(54): n is a, c, g, or t

SEQ ID NO: 2647 - DNA, 406 bp, Mus musculus
  misc_feature (26)..(26): n is a, c, g, or t
  misc_feature (359)..(359): n is a, c, g, or t
  misc_feature (362)..(362): n is a, c, g, or t
  misc_feature (365)..(365): n is a, c, g, or t
  misc_feature (371)..(371): n is a, c, g, or t
  misc_feature (381)..(381): n is a, c, g, or t
caatctgaccagtcagctggctgtgnccagcagtgactgcttccctgtcactacacaagatctttcacagacactctatgggctttttagcaacgataacaaggtggcaccaacaggagagctcattaaacctattgtcccttggttctggaggcaggaagtctgagttcagggtgtcagcaaggctccatccttcaggaggactgggaggagagtctcctccaggcttctcctagcctctggcttctggcagtataatagtgaactctccttgtattcacatctgctaattctttaacctacaacccacgatgaaaatgcaaacacaggagatacacgcttgagtgtaatcctgtgtnctngcntgaaancacatcctanagagccctgaagaatatccactgac

SEQ ID NO: 2648 - DNA, 406 bp, Mus musculus; identical to SEQ ID NO: 2647
  misc_feature (26)..(26): n is a, c, g, or t
  misc_feature (359)..(359): n is a, c, g, or t
  misc_feature (362)..(362): n is a, c, g, or t
  misc_feature (365)..(365): n is a, c, g, or t
  misc_feature (371)..(371): n is a, c, g, or t
  misc_feature (381)..(381): n is a, c, g, or t

SEQ ID NO: 2649 - DNA, 527 bp, Mus musculus
  misc_feature (228)..(228): n is a, c, g, or t
  misc_feature (300)..(300): n is a, c, g, or t
  misc_feature (329)..(343): n is a, c, g, or t
  misc_feature (353)..(353): n is a, c, g, or t
gccaagtagttccaatttgacaaaattcttattttgttttttgttgtggttatattaaaaaaaataaatgaagagtaaatgtgattatctccatactctgcttccctctatgatcatcatagttttttttaataatattttcactgggttactttccctataataatcgagttttatacttcacactgaaatcatcctaaggagggtaaacggataaaccactaatcntatgtctagagggattttctttatgttttaaaaagactattcctacattgacaggggaatgtatataaatcntcctgaggaaagaaacacagcaaactgannnnnnnnnnnnnnnagtgtcacanagggaaagagaaattgagtgtgggaggagaaaccgatattaaattccaattcattcagttagattctgtgctgtgtttgccatcttcccggttgtgtatcttgaatcgttaaagaccttggatttaagatggtgaataaaggtggggaaacagaacaaggcagtgctctggtta

SEQ ID NO: 2650 - DNA, 527 bp, Mus musculus; identical to SEQ ID NO: 2649
  misc_feature (228)..(228): n is a, c, g, or t
  misc_feature (300)..(300): n is a, c, g, or t
  misc_feature (329)..(343): n is a, c, g, or t
  misc_feature (353)..(353): n is a, c, g, or t

SEQ ID NO: 2651 - DNA, 588 bp, Mus musculus
  misc_feature (266)..(266): n is a, c, g, or t
  misc_feature (302)..(302): n is a, c, g, or t
  misc_feature (305)..(317): n is a, c, g, or t
  misc_feature (323)..(337): n is a, c, g, or t
  misc_feature (348)..(348): n is a, c, g, or t
  misc_feature (371)..(372): n is a, c, g, or t
  misc_feature (377)..(377): n is a, c, g, or t
  misc_feature (384)..(384): n is a, c, g, or t
  misc_feature (399)..(399): n is a, c, g, or t
  misc_feature (401)..(401): n is a, c, g, or t
  misc_feature (406)..(406): n is a, c, g, or t
  misc_feature (408)..(409): n is a, c, g, or t
  misc_feature (411)..(413): n is a, c, g, or t
  misc_feature (415)..(415): n is a, c, g, or t
  misc_feature (417)..(420): n is a, c, g, or t
  misc_feature (442)..(456): n is a, c, g, or t
ccacgctttaataggcctgatgcagccccttctccctgcaacgttctgtacatatgactgtaaaatggtaaacgtgtgtattatatctggcctcgttatatagtgtatatatatgtatacatatacatatatataatatatatgaagactgtaaatgttaagacaactagtgttcttattagtatattgcttcacactgaagattgtgtgtatcgagctgtttctaaaagatgtttattttccttaagagttaaaaaaaaaaaaancagtcattgcattcagaaaaaaaaaagtcaataaanatnnnnnnnnnnnnntggaannnnnnnnnnnnnnnatgccaaccanattccctaaggggttgggagtannggganggggccnggggacacaaacagngntcccngnntnnncncnnnngtggaccatgatccctcacctnnnnnnnnnnnnnnnagaaccagggaactgtgtgtctgtttccaggcacacgggatatcattaccctgggacctggtggagggctggaaggcaaagaaacaactgatgccatcaaggcccttcaaggtggagccacagggtagccat

SEQ ID NO: 2652 - DNA, 588 bp, Mus musculus; identical to SEQ ID NO: 2651
  misc_feature (266)..(266): n is a, c, g, or t
  misc_feature (302)..(302): n is a, c, g, or t
  misc_feature (305)..(317): n is a, c, g, or t
  misc_feature (323)..(337): n is a, c, g, or t
  misc_feature (348)..(348): n is a, c, g, or t
  misc_feature (371)..(372): n is a, c, g, or t
  misc_feature (377)..(377): n is a, c, g, or t
  misc_feature (384)..(384): n is a, c, g, or t
  misc_feature (399)..(399): n is a, c, g, or t
  misc_feature (401)..(401): n is a, c, g, or t
  misc_feature (406)..(406): n is a, c, g, or t
  misc_feature (408)..(409): n is a, c, g, or t
  misc_feature (411)..(413): n is a, c, g, or t
  misc_feature (415)..(415): n is a, c, g, or t
  misc_feature (417)..(420): n is a, c, g, or t
  misc_feature (442)..(456): n is a, c, g, or t

SEQ ID NO: 2653 - DNA, 536 bp, Mus musculus
  misc_feature (287)..(287): n is a, c, g, or t
  misc_feature (322)..(322): n is a, c, g, or t
gtagcccttaaagtcattgttacatttagtgatgtgtcttcctgtgatggttaacaatagtgcctttagtaaattattttacagcctaaactgttggttttttgcgtgggtgtccaccttgcagatctgaggtatttaataagaaactgaagtttctttgcatcatttgggttttgtttagtttttttttttttcagtgtaatcttagattcacaacaaaatctagtgggaagtacaacagtctgctgtgtgctagtttaatgttttgtttcttttaaatgccagtnaaaaaaaaaaaggtgctacaatgtgttggtctagnaaaaaaaaaaggttcttgaaattaaaggctagatttggtaacttttatcacatgaatctttaatgaggtatatttaacagctgatgcaacaatttgtatacgctttgggtaagtgacctaatatcactccaaatattactccagctgtatttttggcacataggattctgtcttcggttgatgtgtttttgttgcggtttgttaataagctgcc

SEQ ID NO: 2654 - DNA, 536 bp, Mus musculus; identical to SEQ ID NO: 2653
  misc_feature (287)..(287): n is a, c, g, or t
  misc_feature (322)..(322): n is a, c, g, or t

SEQ ID NO: 2655 - DNA, 430 bp, Mus musculus
gaattctcctttacgcctcgcttgtaccactccccagatgaactgaactgcttctgtttctctggctgtggtctctgatgctttaaagtgggtctctttgatggatcaatgtaccatggaaccgaagaaatatactgaggaatatgagggttgatatcttttccctcttcatcgacttctgcaggagcattgcccagtttcctctgttcttctagctccttcttcttcctccagtcctctcgggtcatctttttcggctcctccaaactcatctcctttgatcccgtcatgggtgtcgcactaactgggtccacagcggccgccggacaatggtgaacttggtatccctctctgctttgcactcctctgctctggtcactgacttcaatttcccattcccgacccattccatgccttcttttgtcaagag

SEQ ID NO: 2656 - DNA, 430 bp, Mus musculus; identical to SEQ ID NO: 2655

SEQ ID NO: 2657 - DNA, 476 bp, Mus musculus
  misc_feature (209)..(209): n is a, c, g, or t
  misc_feature (356)..(356): n is a, c, g, or t
  misc_feature (359)..(359): n is a, c, g, or t
  misc_feature (374)..(374): n is a, c, g, or t
  misc_feature (401)..(417): n is a, c, g, or t
ggtgttcagcttagccttgcccaccttccagtgaccctgagggcacagacctgagtatcccatgtggcctgtgcagagctcagagcactgtgaggaccacccccttccggtcaggccgctcagggacagatggatgggtacctggtgctgtctgcagaactcagtctccagtcctgcacccccactccgctgactccctgaggggtagnagggcagtcacggtgtgatccctgtgcctagctgctgggcctgacctggacttcgctgtatgggggctgctgcttgcttgttttctcaccaggcctgtgccaacacttggccactccccaggccctgaactgttccccagtgggganttnacgccacctttcacnagctaagtgactgtatgtacacctcgnnnnnnnnnnnnnnnnngatgtgggggtgaggattgttttcaataaataaaatccaaggaggcagtagacgattct

SEQ ID NO: 2658 - DNA, 476 bp, Mus musculus; identical to SEQ ID NO: 2657
  misc_feature (209)..(209): n is a, c, g, or t
  misc_feature (356)..(356): n is a, c, g, or t
  misc_feature (359)..(359): n is a, c, g, or t
  misc_feature (374)..(374): n is a, c, g, or t
  misc_feature (401)..(417): n is a, c, g, or t

SEQ ID NO: 2659 - DNA, 550 bp, Mus musculus
  misc_feature (151)..(151): n is a, c, g, or t
  misc_feature (200)..(200): n is a, c, g, or t
  misc_feature (207)..(207): n is a, c, g, or t
  misc_feature (341)..(341): n is a, c, g, or t
  misc_feature (487)..(504): n is a, c, g, or t
ctggaatctgtcctggtatcagcatatctgaaccttgcttctctgcatgaacagaacaattagtggcagttaatgctaatgaagagcacatgactccatctcttccggtaatgctttgttttcctaaatgatgtgtattgttctttttcanctttatttttaaaagtgccaagtcagaaaaccaacaagtggcctgtggntgggccntgcttgggacaaatagaaaccaagttcatgtgacagccttcacgttactagagttcactaaaggacactttccacttgttctctggcattaagtgtgtctttaacagttcatctcagcagtcacaggccatgcnttggtcacaggccatgccttcttaagtatgtatgaaacctttttagagatgaatatatagaatagttctcttagtcatcttttcctgaaatgaaacccaaattctgctctaagttttgagtctttaatgaacttctaatgtactgnnnnnnnnnnnnnnnnnnccccagcctgccacctatgaacatgaatgtacaagacccatgacta

SEQ ID NO: 2660 - DNA, 550 bp, Mus musculus; identical to SEQ ID NO: 2659
  misc_feature (151)..(151): n is a, c, g, or t
  misc_feature (200)..(200): n is a, c, g, or t
  misc_feature (207)..(207): n is a, c, g, or t
  misc_feature (341)..(341): n is a, c, g, or t
  misc_feature (487)..(504): n is a, c, g, or t

SEQ ID NO: 2661 - DNA, 451 bp, Mus musculus
  misc_feature (99)..(99): n is a, c, g, or t
  misc_feature (122)..(123): n is a, c, g, or t
  misc_feature (125)..(128): n is a, c, g, or t
  misc_feature (133)..(134): n is a, c, g, or t
  misc_feature (139)..(141): n is a, c, g, or t
  misc_feature (144)..(144): n is a, c, g, or t
  misc_feature (146)..(146): n is a, c, g, or t
  misc_feature (360)..(360): n is a, c, g, or t
  misc_feature (415)..(415): n is a, c, g, or t
atgactcggagatggaaagacctgtaaatagaggaggaagccgaagtcgcagggtcagcttgagtgacggcagtgacagtgaaagcagctccgcctctncccctctccatcatgaacccccnncnnnnttatnnaaaannnacnanaaccagatccttgaagtgaaaagtccaataaaacaaagcaaatcagataagcaaataaagaatggtgaatgtgacaaggcatatctagatgagttggtagagctccacagaaggttaatgacactgagggaacgacacattctgcagcagatcgtgaaccttatagaggaaactggacactttcatattacgaatacaacatttgattttgatntttgctcgctggacaaaactacagtccgtaaattacagagttacctggaaacatntggaacatcctgaggatacaacagctggacgcatca

SEQ ID NO: 2662 - DNA, 451 bp, Mus musculus; identical to SEQ ID NO: 2661
  misc_feature (99)..(99): n is a, c, g, or t
  misc_feature (122)..(123): n is a, c, g, or t
  misc_feature (125)..(128): n is a, c, g, or t
  misc_feature (133)..(134): n is a, c, g, or t
  misc_feature (139)..(141): n is a, c, g, or t
  misc_feature (144)..(144): n is a, c, g, or t
  misc_feature (146)..(146): n is a, c, g, or t
  misc_feature (360)..(360): n is a, c, g, or t
  misc_feature (415)..(415): n is a, c, g, or t

SEQ ID NO: 2663 - DNA, 545 bp, Mus musculus
  misc_feature (168)..(195): n is a, c, g, or t
  misc_feature (327)..(327): n is a, c, g, or t
  misc_feature (422)..(422): n is a, c, g, or t
  misc_feature (443)..(443): n is a, c, g, or t
  misc_feature (488)..(490): n is a, c, g, or t
  misc_feature (494)..(495): n is a, c, g, or t
  misc_feature (503)..(507): n is a, c, g, or t
  misc_feature (509)..(512): n is a, c, g, or t
tgactttaaaccacttgggaacattttattgtattattaattaaaatacttaagtttgtttaacttcttgctttttatttaaaaattaaattttgcagtagaactacagctcacaggagactgcttaccccttaagtgacattttcctgatggaggtaatctgagaannnnnnnnnnnnnnnnnnnnnnnnnnnngcaatctcaagattaggaccaaaatagatactcaaagatgtttggattgtgaaatgctcttattgaataaggaaagcattttgggataaacccttgtgaaagatgctatgtcacgttttaacacttctcaantaagaccttttctttagcactttgatgtttcttaaggtgaaacttaggcaggaggaattcatgttcttaaggggacagaggggtgggtttttctntgggctttggttttttttttntctgggcattgccctctgatggaattgatatttctttggctgttnnntttnntttttttnnnnntnnnntttttaatatttgttgtatggtgccctgtgagc

SEQ ID NO: 2664 - DNA, 545 bp, Mus musculus; identical to SEQ ID NO: 2663
  misc_feature (168)..(195): n is a, c, g, or t
  misc_feature (327)..(327): n is a, c, g, or t
  misc_feature (422)..(422): n is a, c, g, or t
  misc_feature (443)..(443): n is a, c, g, or t
  misc_feature (488)..(490): n is a, c, g, or t
  misc_feature (494)..(495): n is a, c, g, or t
  misc_feature (503)..(507): n is a, c, g, or t
  misc_feature (509)..(512): n is a, c, g, or t

SEQ ID NO: 2665 - DNA, 481 bp, Mus musculus
  misc_feature (65)..(69): n is a, c, g, or t
  misc_feature (252)..(282): n is a, c, g, or t
  misc_feature (348)..(348): n is a, c, g, or t
ataggctcccagaacaccttacagagccccttgttctcccttggggctgcataggccacctcccnnnnnctggcctttccaggggacagaatccttatccttgaacctttctaggcgcaggataacatctgtgcaagttgacaccaggttaggcctgcaactctcgcccatcctccagggggcgcactttacattgccaaccacagcctccattggctcccaaggtgctagggaagattgttggtttctgtnnnnnnnnnnnnnnnnnnnnnnnnnnnnnnnggacttgggacttttatatttggtgaccagtgccctccgcttctgtttgactccccgtgacctctntactatgcatttccctttttatcaggtgtataaagttaaatactgtgtatttatcacttacaagaacatgaacttaaaaaagatgagctttcggttgtttttccacaggtgatcaagcttctgtgtaaacttg

SEQ ID NO: 2666 - DNA, 481 bp, Mus musculus; identical to SEQ ID NO: 2665
  misc_feature (65)..(69): n is a, c, g, or t
  misc_feature (252)..(282): n is a, c, g, or t
  misc_feature (348)..(348): n is a, c, g, or t

SEQ ID NO: 2667 - DNA, 110 bp, Mus musculus
aagagatttgctcatgtttttccgaagtctgcatttttttgtggagtggtgtgaatatcgtgagaacacatttaagcatttcaaggagaaatacccagatactgtatacc

SEQ ID NO: 2668 - DNA, 110 bp, Mus musculus; identical to SEQ ID NO: 2667

SEQ ID NO: 2669 - DNA, 550 bp, Mus musculus
  misc_feature (30)..(30): n is a, c, g, or t
  misc_feature (244)..(257): n is a, c, g, or t
  misc_feature (261)..(261): n is a, c, g, or t
  misc_feature (302)..(302): n is a, c, g, or t
  misc_feature (304)..(304): n is a, c, g, or t
  misc_feature (362)..(362): n is a, c, g, or t
  misc_feature (365)..(365): n is a, c, g, or t
  misc_feature (413)..(413): n is a, c, g, or t
  misc_feature (415)..(415): n is a, c, g, or t
  misc_feature (418)..(418): n is a, c, g, or t
  misc_feature (434)..(434): n is a, c, g, or t
  misc_feature (441)..(441): n is a, c, g, or t
  misc_feature (443)..(460): n is a, c, g, or t
  misc_feature (495)..(495): n is a, c, g, or t
  misc_feature (519)..(519): n is a, c, g, or t
tcagtgtttgcatgccctatcctgcgacancagacctcagattccaacccccccatcaagctcatctgtggccacgtcatctccagagatgcactcaacaaactcatcaatggaggaaagctaaagtgtccctactgtcccatggaacagaatccagcagatgggaaacgcatcatattctgattccaaggaacattctagaaggtgtaatccacccatgggcctttgtggagggactggcttnnnnnnnnnnnnnngccnctcagaccagcattaccaagagacccaacctgcctaggcananggccagggaaggctgtgaaccagcagcctatgcttccttaccttctagggggactggntantctgttcctgcattctgtttacacttgcccctgacggagcagcaaagntnttngtcatcaaatgcaganatctttntnnnnnnnnnnnnnnnnnngtttccagctgtggcccacttcctactgtacagtntcaactgtatctacccattcattntccactgtaaataacccgttagaactgaatg

SEQ ID NO: 2670 - DNA, 550 bp, Mus musculus; identical to SEQ ID NO: 2669
  misc_feature (30)..(30): n is a, c, g, or t
  misc_feature (244)..(257): n is a, c, g, or t
  misc_feature (261)..(261): n is a, c, g, or t
  misc_feature (302)..(302): n is a, c, g, or t
  misc_feature (304)..(304): n is a, c, g, or t
  misc_feature (362)..(362): n is a, c, g, or t
  misc_feature (365)..(365): n is a, c, g, or t
  misc_feature (413)..(413): n is a, c, g, or t
  misc_feature (415)..(415): n is a, c, g, or t
  misc_feature (418)..(418): n is a, c, g, or t
  misc_feature (434)..(434): n is a, c, g, or t
  misc_feature (441)..(441): n is a, c, g, or t
  misc_feature (443)..(460): n is a, c, g, or t
  misc_feature (495)..(495): n is a, c, g, or t
  misc_feature (519)..(519): n is a, c, g, or t

SEQ ID NO: 2671 - DNA, 456 bp, Mus musculus
  misc_feature (51)..(51): n is a, c, g, or t
  misc_feature (107)..(123): n is a, c, g, or t
  misc_feature (148)..(148): n is a, c, g, or t
  misc_feature (276)..(277): n is a, c, g, or t
  misc_feature (279)..(280): n is a, c, g, or t
  misc_feature (282)..(283): n is a, c, g, or t
ttcaaagttgcctaaatccatttggaaatctttaaaaaaaattggggattnttaaagttgaatttattggcttttctgatccagttttgtttggaccaaaaaccagnnnnnnnnnnnnnnnnnagcatatatttttatatttactganatggactgtggtgactttggataataaggaaaaagtttaatattaaagccatgtttattacagtataattaacatgttaaaccatgggataaatgccatcaataaaactttatgaagcaaaaaaaaannannannaataggatgatcaagagaggtaattggtcagaggggaggagggcgacagagaggtaagaaaaaaaggggaggcccctgtgaagggagcaagtcgaagtgtgcaggagagagcaaggaatagcgacttgagggagggcgctgagaagtcgcgtcctggggacaaatgtttaagc

SEQ ID NO: 2672 - DNA, 456 bp, Mus musculus; identical to SEQ ID NO: 2671
  misc_feature (51)..(51): n is a, c, g, or t
  misc_feature (107)..(123): n is a, c, g, or t
  misc_feature (148)..(148): n is a, c, g, or t
  misc_feature (276)..(277): n is a, c, g, or t
  misc_feature (279)..(280): n is a, c, g, or t
  misc_feature (282)..(283): n is a, c, g, or t

SEQ ID NO: 2673 - DNA, 295 bp, Mus musculus
  misc_feature (41)..(41): n is a, c, g, or t
  misc_feature (53)..(98): n is a, c, g, or t
  misc_feature (109)..(109): n is a, c, g, or t
  misc_feature (126)..(146): n is a, c, g, or t
gcaccaagtttgttcagcttttactaaagatgtctacagcngcggtttttatnnnnnnnnnnnnnnnnnnnnnnnnnnnnnnnnnnnnnnnnnnnnnnggtgggaagcnttatgaaatgtccaaannnnnnnnnnnnnnnnnnnnnttagaccagcagtggcttgttgagtaatgatgacagagactcgccggcggtgtgcgcatggtcagaaccctctctgggatcaagaatggagcaggaggttttgtctctggtcctccctgccctctgctccttcacaagcgaagtgctga

SEQ ID NO: 2674 - DNA, 295 bp, Mus musculus; identical to SEQ ID NO: 2673
  misc_feature (41)..(41): n is a, c, g, or t
  misc_feature (53)..(98): n is a, c, g, or t
  misc_feature (109)..(109): n is a, c, g, or t
  misc_feature (126)..(146): n is a, c, g, or t

SEQ ID NO: 2675 - DNA, 237 bp, Mus musculus
tctccagagacaaggtttacatccagggatgatgtttgtgttctgccaaacaactaattgagtagcaagcctaacaacttactacgtgctgataaaagcttgtgtttattttaggaatttttttttaaagacaagagtctgttaggtagcttgctatgtaatccaggctggcctggaactcaaagatatccacttggctgtctgcctccgagtgccagtgttaaaggcctgtatccc

SEQ ID NO: 2676 - DNA, 237 bp, Mus musculus; identical to SEQ ID NO: 2675

SEQ ID NO: 2677 - DNA, 330 bp, Mus musculus
  misc_feature (52)..(73): n is a, c, g, or t
  misc_feature (126)..(126): n is a, c, g, or t
  misc_feature (196)..(198): n is a, c, g, or t
  misc_feature (201)..(203): n is a, c, g, or t
  misc_feature (208)..(208): n is a, c, g, or t
  misc_feature (210)..(213): n is a, c, g, or t
  misc_feature (215)..(216): n is a, c, g, or t
  misc_feature (218)..(222): n is a, c, g, or t
  misc_feature (224)..(229): n is a, c, g, or t
  misc_feature (231)..(231): n is a, c, g, or t
  misc_feature (233)..(263): n is a, c, g, or t
  misc_feature (283)..(283): n is a, c, g, or t
gtttgctcacggagggtcactggcagccttgatggatgagacatattcgaannnnnnnnnnnnnnnnnnnnnnggactattcacactaagtctaaacatcaagttcaaaaacttgatccccgtggnctctttggctgtcctggacattcaagtagaaaagattgaagaccagaaactctacatgtcctgcatcgcnnngannngaganannnngnncnnnnntnnnnnntncnnnnnnnnnnnnnnnnnnnnnnnnnnnnnnnaacagtcccaggagcaatgnccttgaccttgatgactcagtggccacataacagacaagggtcccca

SEQ ID NO: 2678 - DNA, 330 bp, Mus musculus; identical to SEQ ID NO: 2677
  misc_feature (52)..(73): n is a, c, g, or t
  misc_feature (126)..(126): n is a, c, g, or t
  misc_feature (196)..(198): n is a, c, g, or t
  misc_feature (201)..(203): n is a, c, g, or t
  misc_feature (208)..(208): n is a, c, g, or t
  misc_feature (210)..(213): n is a, c, g, or t
  misc_feature (215)..(216): n is a, c, g, or t
  misc_feature (218)..(222): n is a, c, g, or t
  misc_feature (224)..(229): n is a, c, g, or t
  misc_feature (231)..(231): n is a, c, g, or t
  misc_feature (233)..(263): n is a, c, g, or t
  misc_feature (283)..(283): n is a, c, g, or t

SEQ ID NO: 2679 - DNA, 437 bp, Mus musculus
  misc_feature (47)..(47): n is a, c, g, or t
  misc_feature (226)..(227): n is a, c, g, or t
  misc_feature (230)..(235): n is a, c, g, or t
  misc_feature (237)..(239): n is a, c, g, or t
  misc_feature (293)..(293): n is a, c, g, or t
  misc_feature (324)..(324): n is a, c, g, or t
  misc_feature (337)..(337): n is a, c, g, or t
  misc_feature (343)..(343): n is a, c, g, or t
  misc_feature (382)..(382): n is a, c, g, or t
  misc_feature (387)..(387): n is a, c, g, or t
  misc_feature (396)..(396): n is a, c, g, or t
  misc_feature (399)..(399): n is a, c, g, or t
  misc_feature (412)..(412): n is a, c, g, or t
cactgatgaaggagtccttgctcttgcactcaattgtcatctgctanagatcattgatttgggtggctgcttaggtattactgatgtgtccttacatgcattaggaaaaaactgcccatttctgcagtgtgttgacatttcaactacgcaggtatctgacaatggtgtggttgcacttgttagtggaccatgtgccaaacaattagaggagattaacatgagatanngtnnnnnncnnnctgataaggctgtagaagctgctctgactgcatgtcctcggatatgtatacttnttttccatggctgccccctgataacagatcnttcacaagaagtnttggancaattaataggatcaagaaaactaaagcaagtgacttgntctgnttattgatnttnaccgaggctgatntcaaaaccttgcacaggatttgcgc

SEQ ID NO: 2680 - DNA, 437 bp, Mus musculus; identical to SEQ ID NO: 2679
  misc_feature (47)..(47): n is a, c, g, or t
  misc_feature (226)..(227): n is a, c, g, or t
  misc_feature (230)..(235): n is a, c, g, or t
  misc_feature (237)..(239): n is a, c, g, or t
  misc_feature (293)..(293): n is a, c, g, or t
  misc_feature (324)..(324): n is a, c, g, or t
  misc_feature (337)..(337): n is a, c, g, or t
  misc_feature (343)..(343): n is a, c, g, or t
  misc_feature (382)..(382): n is a, c, g, or t
  misc_feature (387)..(387): n is a, c, g, or t
  misc_feature (396)..(396): n is a, c, g, or t
  misc_feature (399)..(399): n is a, c, g, or t
  misc_feature (412)..(412): n is a, c, g, or t

SEQ ID NO: 2681 - DNA, 226 bp, Mus musculus
  misc_feature (62)..(63): n is a, c, g, or t
  misc_feature (86)..(86): n is a, c, g, or t
  misc_feature (93)..(93): n is a, c, g, or t
  misc_feature (101)..(101): n is a, c, g, or t
  misc_feature (127)..(127): n is a, c, g, or t
  misc_feature (134)..(134): n is a, c, g, or t
  misc_feature (140)..(140): n is a, c, g, or t
ccttattgttggaagattggtctctgtcacagccgcagccaggttcctgaagttccctcagnngaagatggaaagacaaaggctcnttgttcngggggtangaagtgtatgtattgaatcatgttantggattnttaggncctgaggcctgccctttagaagattgtagtgtgtatgtcttcaagactatgaattctataagaatcaatactttaaggtcattctg

SEQ ID NO: 2682 - DNA, 226 bp, Mus musculus; identical to SEQ ID NO: 2681
  misc_feature (62)..(63): n is a, c, g, or t
  misc_feature (86)..(86): n is a, c, g, or t
  misc_feature (93)..(93): n is a, c, g, or t
  misc_feature (101)..(101): n is a, c, g, or t
  misc_feature (127)..(127): n is a, c, g, or t
  misc_feature (134)..(134): n is a, c, g, or t
  misc_feature (140)..(140): n is a, c, g, or t

SEQ ID NO: 2683 - DNA, 547 bp, Mus musculus
  misc_feature (27)..(27): n is a, c, g, or t
  misc_feature (38)..(38): n is a, c, g, or t
  misc_feature (48)..(48): n is a, c, g, or t
  misc_feature (79)..(79): n is a, c, g, or t
  misc_feature (100)..(100): n is a, c, g, or t
  misc_feature (147)..(147): n is a, c, g, or t
  misc_feature (158)..(158): n is a, c, g, or t
  misc_feature (161)..(161): n is a, c, g, or t
  misc_feature (180)..(181): n is a, c, g, or t
  misc_feature (280)..(280): n is a, c, g, or t
  misc_feature (285)..(285): n is a, c, g, or t
  misc_feature (296)..(296): n is a, c, g, or t
  misc_feature (305)..(305): n is a, c, g, or t
  misc_feature (332)..(332): n is a, c, g, or t
  misc_feature (364)..(364): n is a, c, g, or t
  misc_feature (408)..(408): n is a, c, g, or t
  misc_feature (508)..(508): n is a, c, g, or t
  misc_feature (513)..(513): n is a, c, g, or t
  misc_feature (521)..(521): n is a, c, g, or t
agcctcagatgaacccgagacttgtgntgctgccgctntagcgtctgnacaagctgagagccaaagccccagcagctantccctggcacggcaggtcccngcatggaagtggtcattttaaatccagggaaatgccttatattgaangaaaataatgntcnctataatatttaaaaatcnntggcaatgtttatttacccccaatgcctttttatttaatgcacaaatttatttagatgtttctgtttgctaatcctgctctttaatgcattgttactgntcatnccctttgtctntttatatcnggaaattggggacttgcaattttctgnttttgacaattccaaacactatgagtgaaatnagttaaataagttaactgcatcctgtcagacaatgggattcctntcgtgggccacagggagtgttaatgaattataagtcactttgtacttaggggttttatttgtattattgggggtggggcaggtttgcatagaaggaattntattntcagcacntcagcatcctgacacaatgcactcag

SEQ ID NO: 2684 - DNA, 547 bp, Mus musculus; identical to SEQ ID NO: 2683
  misc_feature (27)..(27): n is a, c, g, or t
  misc_feature (38)..(38): n is a, c, g, or t
  misc_feature (48)..(48): n is a, c, g, or t
  misc_feature (79)..(79): n is a, c, g, or t
  misc_feature (100)..(100): n is a, c, g, or t
  misc_feature (147)..(147): n is a, c, g, or t
  misc_feature (158)..(158): n is a, c, g, or t
  misc_feature (161)..(161): n is a, c, g, or t
  misc_feature (180)..(181): n is a, c, g, or t
  misc_feature (280)..(280): n is a, c, g, or t
  misc_feature (285)..(285): n is a, c, g, or t
  misc_feature (296)..(296): n is a, c, g, or t
  misc_feature (305)..(305): n is a, c, g, or t
  misc_feature (332)..(332): n is a, c, g, or t
  misc_feature (364)..(364): n is a, c, g, or t
  misc_feature (408)..(408): n is a, c, g, or t
  misc_feature (508)..(508): n is a, c, g, or t
  misc_feature (513)..(513): n is a, c, g, or t
  misc_feature (521)..(521): n is a, c, g, or t

SEQ ID NO: 2685 - DNA, 335 bp, Mus musculus
  misc_feature (48)..(48): n is a, c, g, or t
  misc_feature (56)..(56): n is a, c, g, or t
  misc_feature (93)..(93): n is a, c, g, or t
  misc_feature (99)..(99): n is a, c, g, or t
  misc_feature (169)..(169): n is a, c, g, or t
  misc_feature (188)..(188): n is a, c, g, or t
  misc_feature (201)..(220): n is a, c, g, or t
  misc_feature (231)..(231): n is a, c, g, or t
  misc_feature (292)..(292): n is a, c, g, or t
  misc_feature (294)..(294): n is a, c, g, or t
tgaaaaagtggcttcatgagcgctttgagataaaagataggttgctcntagagttntatgattcaccagatccagaaagaagaaacaaatttnctgggnaaagtgttcattccagactaagtgtgaagaagactttaccttcagtgttgatcttggggagtttgactgntgtcatgctgatgacggantccggaaggaaannnnnnnnnnnnnnnnnnnngtatggaaccntccttggctgcctgtggtttgttattaaagcataagcaagtagcaggctgcagtcacagtntnttattgatggctacacgttgtatcacattgtttcctgaatt

SEQ ID NO: 2686 - DNA, 335 bp, Mus musculus; identical to SEQ ID NO: 2685
  misc_feature (48)..(48): n is a, c, g, or t
  misc_feature (56)..(56): n is a, c, g, or t
  misc_feature (93)..(93): n is a, c, g, or t
  misc_feature (99)..(99): n is a, c, g, or t
  misc_feature (169)..(169): n is a, c, g, or t
  misc_feature (188)..(188): n is a, c, g, or t
  misc_feature (201)..(220): n is a, c, g, or t
  misc_feature (231)..(231): n is a, c, g, or t
  misc_feature (292)..(292): n is a, c, g, or t
  misc_feature (294)..(294): n is a, c, g, or t

SEQ ID NO: 2687 - DNA, 154 bp, Mus musculus
  misc_feature (105)..(105): n is a, c, g, or t
tgctttcagggatcagggaaggtctgtaggcagaaggtatgatggtgccctagcagagtatgaaaccttactcattacagtaattaattagggaagcagccgcangccgtcaaatgttttggcatttgtcctgcagtgttcttttgcttgaagt

SEQ ID NO: 2688 - DNA, 154 bp, Mus musculus; identical to SEQ ID NO: 2687
  misc_feature (105)..(105): n is a, c, g, or t

SEQ ID NO: 2689 - DNA, 441 bp, Mus musculus
  misc_feature (30)..(31): n is a, c, g, or t
  misc_feature (34)..(35): n is a, c, g, or t
  misc_feature (37)..(37): n is a, c, g, or t
  misc_feature (40)..(40): n is a, c, g, or t
  misc_feature (42)..(59): n is a, c, g, or t
  misc_feature (61)..(88): n is a, c, g, or t
  misc_feature (94)..(109): n is a, c, g, or t
  misc_feature (152)..(162): n is a, c, g, or t
  misc_feature (164)..(166): n is a, c, g, or t
  misc_feature (174)..(174): n is a, c, g, or t
  misc_feature (191)..(191): n is a, c, g, or t
  misc_feature (204)..(204): n is a, c, g, or t
ccgggtccaagagtggatttagacacagcnnacnntnttntnnnnnnnnnnnnnnnnnntnnnnnnnnnnnnnnnnnnnnnnnnnnnnctgtcnnnnnnnnnnnnnnnnccaaacctaacttggttgtacaacggaagcctggtccacagannnnnnnnnnnannnccagcatntagttctgtagaaagcntcctgagtctatntcctgaggcaaagcaactttatgaacatctgttcaatgccacaaaatcatatgccccagctgaattgttcttaccaaaaactaaatcaaaatccaaaaaaaagaggcagaagaaaaaggttgccagcctgggaaccactgcagatgccaagcactggtatgacagaagcaaccggtttggaccgttaatgcctgaaagcttggaggagcatgtagagaactcagagcttgaataaac

SEQ ID NO: 2690 - DNA, 441 bp, Mus musculus; identical to SEQ ID NO: 2689
  misc_feature (30)..(31): n is a, c, g, or t
  misc_feature (34)..(35): n is a, c, g, or t
  misc_feature (37)..(37): n is a, c, g, or t
  misc_feature (40)..(40): n is a, c, g, or t
  misc_feature (42)..(59): n is a, c, g, or t
  misc_feature (61)..(88): n is a, c, g, or t
  misc_feature (94)..(109): n is a, c, g, or t
  misc_feature (152)..(162): n is a, c, g, or t
  misc_feature (164)..(166): n is a, c, g, or t
  misc_feature (174)..(174): n is a, c, g, or t
  misc_feature (191)..(191): n is a, c, g, or t
  misc_feature (204)..(204): n is a, c, g, or t

SEQ ID NO: 2691 - DNA, 580 bp, Mus musculus
  misc_feature (125)..(125): n is a, c, g, or t
  misc_feature (232)..(262): n is a, c, g, or t
  misc_feature (264)..(269): n is a, c, g, or t
  misc_feature (271)..(271): n is a, c, g, or t
  misc_feature (273)..(292): n is a, c, g, or t
  misc_feature (294)..(295): n is a, c, g, or t
  misc_feature (297)..(298): n is a, c, g, or t
  misc_feature (303)..(303): n is a, c, g, or t
  misc_feature (308)..(308): n is a, c, g, or t
  misc_feature (312)..(312): n is a, c, g, or t
  misc_feature (315)..(315): n is a, c, g, or t
  misc_feature (320)..(321): n is a, c, g, or t
  misc_feature (325)..(326): n is a, c, g, or t
  misc_feature (328)..(328): n is a, c, g, or t
  misc_feature (330)..(330): n is a, c, g, or t
  misc_feature (337)..(337): n is a, c, g, or t
  misc_feature (342)..(342): n is a, c, g, or t
  misc_feature (349)..(349): n is a, c, g, or t
  misc_feature (380)..(380): n is a, c, g, or t
  misc_feature (382)..(382): n is a, c, g, or t
  misc_feature (385)..(385): n is a, c, g, or t
  misc_feature (387)..(387): n is a, c, g, or t
  misc_feature (418)..(418): n is a, c, g, or t
  misc_feature (426)..(426): n is a, c, g, or t
  misc_feature (428)..(428): n is a, c, g, or t
  misc_feature (464)..(464): n is a, c, g, or t
  misc_feature (469)..(470): n is a, c, g, or t
  misc_feature (508)..(508): n is a, c, g, or t
  misc_feature (516)..(516): n is a, c, g, or t
  misc_feature (518)..(518): n is a, c, g, or t
ggatgttcgagttccctgcacaccggttgctaggctaaacaaccaccgagcatgtgtcaatggcattgcctgggccccacactcgtcctgccacatctgtactgcagcggatgaccatcaggccntcatctgggacatccagcagatgcctcgggccatcgaggaccctatcttggcctacacagctgagggagagatcaacaatgtgcagtgggcctccactcagcctgannnnnnnnnnnnnnnnnnnnnnnnnnnnnnngnnnnnntncnnnnnnnnnnnnnnnnnnnncnnanntatcnggcangggnttntgtgnnttcnncntntgccccnttccntcccatntaagaagaacatgttcccagtggccagtatntntantnctgctttacacccactgtgttcagaagctgntgtagaantncaggccagttaccccgctgtctgtgttggactgtgntgtgnngcgccactgcagcccagggctgggttttaaattttcantcctttcntnttctttgcttcttcaattaaacgtttctgtatatttgtttgtcagctgttgtgttcataaac

SEQ ID NO: 2692 - DNA, 580 bp, Mus musculus; identical to SEQ ID NO: 2691
  misc_feature (125)..(125): n is a, c, g, or t
  misc_feature (232)..(262): n is a, c, g, or t
  misc_feature (264)..(269): n is a, c, g, or t
  misc_feature (271)..(271): n is a, c, g, or t
  misc_feature (273)..(292): n is a, c, g, or t
  misc_feature (294)..(295): n is a, c, g, or t
  misc_feature (297)..(298): n is a, c, g, or t
  misc_feature (303)..(303): n is a, c, g, or t
  misc_feature (308)..(308): n is a, c, g, or t
  misc_feature (312)..(312): n is a, c, g, or t
  misc_feature (315)..(315): n is a, c, g, or t
  misc_feature (320)..(321): n is a, c, g, or t
  misc_feature (325)..(326): n is a, c, g, or t
  misc_feature (328)..(328): n is a, c, g, or t
  misc_feature (330)..(330): n is a, c, g, or t
  misc_feature (337)..(337): n is a, c, g, or t
  misc_feature (342)..(342): n is a, c, g, or t
  misc_feature (349)..(349): n is a, c, g, or t
  misc_feature (380)..(380): n is a, c, g, or t
  misc_feature (382)..(382): n is a, c, g, or t
  misc_feature (385)..(385): n is a, c, g, or t
  misc_feature (387)..(387): n is a, c, g, or t
  misc_feature (418)..(418): n is a, c, g, or t
  misc_feature (426)..(426): n is a, c, g, or t
  misc_feature (428)..(428): n is a, c, g, or t
  misc_feature (464)..(464): n is a, c, g, or t
  misc_feature (469)..(470): n is a, c, g, or t
  misc_feature (508)..(508): n is a, c, g, or t
  misc_feature (516)..(516): n is a, c, g, or t
  misc_feature (518)..(518): n is a, c, g, or t

SEQ ID NO: 2693 - DNA, 530 bp, Mus musculus
  misc_feature (128)..(147): n is a, c, g, or t
  misc_feature (170)..(170): n is a, c, g, or t
  misc_feature (316)..(316): n is a, c, g, or t
  misc_feature (358)..(359): n is a, c, g, or t
  misc_feature (362)..(362): n is a, c, g, or t
  misc_feature (404)..(404): n is a, c, g, or t
  misc_feature (471)..(471): n is a, c, g, or t
  misc_feature (500)..(500): n is a, c, g, or t
  misc_feature (502)..(502): n is a, c, g, or t
agactttcagtaattaggatcatcggcagaagtccagctatcatacagaagctttcggcatcagtgctcgtagctgtaccgacgaagctcacattgtctcgcgaatatatagcacagaagcccggacnnnnnnnnnnnnnnnnnnnnacgcacacgtggacaaggtgacntacggctcttttgactacacttcgctgctttacctatcggattacttagaggacttcggtggagggcgctttgtgttcatggaagaagggtccaacaagacagtggagcccagagctggtcgagtctcattctttacctcaggctntgagaacctgcaccgagtggagaaagtcctctggggcacccnntangccatcaccatcgctttcacctgcaacccggaccacggcatngaggacccagtactcacgtgaccagctaggtcaggtcctgagtaccatgtcctgtcagagaaggcantcctaggccgggtggagggtgtgttcatntntcccacttcaggccattgctgctgctca

SEQ ID NO: 2694 - DNA, 530 bp, Mus musculus; identical to SEQ ID NO: 2693
  misc_feature (128)..(147): n is a, c, g, or t
  misc_feature (170)..(170): n is a, c, g, or t
  misc_feature (316)..(316): n is a, c, g, or t
  misc_feature (358)..(359): n is a, c, g, or t
  misc_feature (362)..(362): n is a, c, g, or t
  misc_feature (404)..(404): n is a, c, g, or t
  misc_feature (471)..(471): n is a, c, g, or t
  misc_feature (500)..(500): n is a, c, g, or t
  misc_feature (502)..(502): n is a, c, g, or t

SEQ ID NO: 2695 - DNA, 460 bp, Mus musculus
  misc_feature (32)..(32): n is a, c, g, or t
  misc_feature (36)..(36): n is a, c, g, or t
  misc_feature (42)..(42): n is a, c, g, or t
  misc_feature (45)..(45): n is a, c, g, or t
  misc_feature (48)..(48): n is a, c, g, or t
  misc_feature (52)..(52): n is a, c, g, or t
  misc_feature (65)..(65): n is a, c, g, or t
  misc_feature (86)..(86): n is a, c, g, or t
  misc_feature (97)..(97): n is a, c, g, or t
  misc_feature (102)..(102): n is a, c, g, or t
  misc_feature (104)..(104): n is a, c, g, or t
  misc_feature (107)..(107): n is a, c, g, or t
  misc_feature (112)..(112): n is a, c, g, or t
  misc_feature (121)..(121): n is a, c, g, or t
  misc_feature (148)..(148): n is a, c, g, or t
  misc_feature (150)..(150): n is a, c, g, or t
  misc_feature (318)..(318): n is a, c, g, or t
  misc_feature (330)..(370): n is a, c, g, or t
cctttgagtagtcattgttaagactgtattantttnttcagnganatntcanactcgaagaatcnacagatgttttaagtataatngtatttgcctnatatntntgnagttntatattacntctaattattattgtatgaaatatgtnanacaggtatgtcaagtgtatatagctctggtctgtaattcagaaatgatttatagcctccagaagccattatttgcacttacatatatgatcagtatagaaagcaataaaatgtttaagttataaggagttgttattctaaaaattgtttaataaaccatgtatctagnatcatgctagtnnnnnnnnnnnnnnnnnnnnnnnnnnnnnnnnnnnnnnnnngtcgaaacacttgtctagcaaggttaaagtcctgggtttgatcctagcaaaggaaaagtgaaaaacttcatttgtgctatgcctaaaaga

SEQ ID NO: 2696 - DNA, 460 bp, Mus musculus; identical to SEQ ID NO: 2695
  misc_feature (32)..(32): n is a, c, g, or t
  misc_feature (36)..(36): n is a, c, g, or t
  misc_feature (42)..(42): n is a, c, g, or t
  misc_feature (45)..(45): n is a, c, g, or t
  misc_feature (48)..(48): n is a, c, g, or t
  misc_feature (52)..(52): n is a, c, g, or t
  misc_feature (65)..(65): n is a, c, g, or t
  misc_feature (86)..(86): n is a, c, g, or t
  misc_feature (97)..(97): n is a, c, g, or t
  misc_feature (102)..(102): n is a, c, g, or t
  misc_feature (104)..(104): n is a, c, g, or t
  misc_feature (107)..(107): n is a, c, g, or t
  misc_feature (112)..(112): n is a, c, g, or t
  misc_feature (121)..(121): n is a, c, g, or t
  misc_feature (148)..(148): n is a, c, g, or t
  misc_feature (150)..(150): n is a, c, g, or t
  misc_feature (318)..(318): n is a, c, g, or t
  misc_feature (330)..(370): n is a, c, g, or t

SEQ ID NO: 2697 - DNA, 248 bp, Mus musculus
  misc_feature (30)..(30): n is a, c, g, or t
  misc_feature (36)..(36): n is a, c, g, or t
  misc_feature (66)..(66): n is a, c, g, or t
  misc_feature (77)..(77): n is a, c, g, or t
  misc_feature (83)..(83): n is a, c, g, or t
  misc_feature (94)..(94): n is a, c, g, or t
  misc_feature (146)..(146): n is a, c, g, or t
  misc_feature (177)..(177): n is a, c, g, or t
  misc_feature (179)..(179): n is a, c, g, or t
  misc_feature (182)..(182): n is a, c, g, or t
taagctatatggacccagctaccggctatntggttntcacaaggctggcccacttgcagagaggcncctgctgtggntctgcntgcagacactntccatatggccaagtcaatgtgaaagatccatctaagaagaagcaattcaantcctatttttatgtttgacaacaacttcatntntantctgtcaaattaagtgtgtgtttttgaaaataaagccctaatctagaatgacctgttacgaatatt

SEQ ID NO: 2698 - DNA, 248 bp, Mus musculus; identical to SEQ ID NO: 2697
  misc_feature (30)..(30): n is a, c, g, or t
  misc_feature (36)..(36): n is a, c, g, or t
  misc_feature (66)..(66): n is a, c, g, or t
  misc_feature (77)..(77): n is a, c, g, or t
  misc_feature (83)..(83): n is a, c, g, or t
  misc_feature (94)..(94): n is a, c, g, or t
  misc_feature (146)..(146): n is a, c, g, or t
  misc_feature (177)..(177): n is a, c, g, or t
  misc_feature (179)..(179): n is a, c, g, or t
  misc_feature (182)..(182): n is a, c, g, or t

SEQ ID NO: 2699 - DNA, 161 bp, Mus musculus
  misc_feature (56)..(72): n is a, c, g, or t
  misc_feature (109)..(109): n is a, c, g, or t
gtaatataatttaccttccacctatgtttttaattacttgataaatttatcacatnnnnnnnnnnnnnnnnnatctttaaatgtgttttataatgtttagttacaaatntccttcacttgctatttgttttaccatttctcaatattgtatttgtgaattg

SEQ ID NO: 2700 - DNA, 161 bp, Mus musculus; identical to SEQ ID NO: 2699
  misc_feature (56)..(72): n is a, c, g, or t
  misc_feature (109)..(109): n is a, c, g, or t

SEQ ID NO: 2701 - DNA, 119 bp, Mus musculus
  misc_feature (43)..(43): n is a, c, g, or t
  misc_feature (45)..(45): n is a, c, g, or t
  misc_feature (48)..(48): n is a, c, g, or t
acacaccatttgtcccagaccagtggcattaggccatatattntnttntagtgtttgcttaaaatatgtgaagtttttcttgctatttcaataacaaatggtgctgctaacacccaaca

SEQ ID NO: 2702 - DNA, 119 bp, Mus musculus; identical to SEQ ID NO: 2701
  misc_feature (43)..(43): n is a, c, g, or t
  misc_feature (45)..(45): n is a, c, g, or t
  misc_feature (48)..(48): n is a, c, g, or t

SEQ ID NO: 2703 - DNA, 312 bp, Mus musculus
  misc_feature (88)..(88): n is a, c, g, or t
caagccatttacaagggtattgtaatcagtcatgttggcaggattgtggcaatggtctgtatttcttctagtcacaagtttgtttctngagggtggccagttactactgaaagaacattccactgggcagattcttgggtgccttctggatggatatcactgggctaagtgctggtgtggtaaagaccaattcattatgagacacctatgcaaacaactacaagatgggttaggatggactaagaattataggaataatgaaatagggctccatgagaatttgatagagagggacttagcttcttcaggtag

SEQ ID NO: 2704 - DNA, 312 bp, Mus musculus; identical to SEQ ID NO: 2703
  misc_feature (88)..(88): n is a, c, g, or t

SEQ ID NO: 2705 - DNA, 219 bp, Mus musculus
cccagctgctggaaatcaagggcggatctcaaaggctgcagctatctttttaccaggaatatcttcctatggcttcctttagcctgtcttctccaccccgtttatttttatcttaaacagagagacaggagaattactcttacactctgatagagtgttttctaccatcttcccagactctaggtgccttgcagaggttgaaggccagccacgccactg

SEQ ID NO: 2706 - DNA, 219 bp, Mus musculus; identical to SEQ ID NO: 2705

SEQ ID NO: 2707 - DNA, 424 bp, Mus musculus
  misc_feature (97)..(97): n is a, c, g, or t
  misc_feature (105)..(106): n is a, c, g, or t
  misc_feature (233)..(247): n is a, c, g, or t
  misc_feature (299)..(299): n is a, c, g, or t
  misc_feature (303)..(303): n is a, c, g, or t
gcctctttaggaagtgagggtttcttgttctcctttaaaaatcagtctctagactacggccatcaggaatctaccctcgcccacctgaccctgcgangacacggnnacccagcagcacctctcctctgttaccttccccttggcgatcgctcgggtttgtgttaagttaatctgtatgtcctgtctgccagcgttccctgtactataggcctgtgtatagtgtagggcagagnnnnnnnnnnnnnnntagtgcttgacttgggaatcaggacagtacctgtacaggcacggggacccgntccntccgtgcgccgccctatattgagggctccagctttcccttggtttttgaaaggggtttatgtataaatatattttatgcctttttattacaattcttgttactcaatgacttttttcatgg

SEQ ID NO: 2708 - DNA, 424 bp, Mus musculus; identical to SEQ ID NO: 2707
  misc_feature (97)..(97): n is a, c, g, or t
  misc_feature (105)..(106): n is a, c, g, or t
  misc_feature (233)..(247): n is a, c, g, or t
  misc_feature (299)..(299): n is a, c, g, or t
  misc_feature (303)..(303): n is a, c, g, or t

SEQ ID NO: 2709 - DNA, 387 bp, Mus musculus
  misc_feature (125)..(125): n is a, c, g, or t
  misc_feature (129)..(130): n is a, c, g, or t
  misc_feature (132)..(132): n is a, c, g, or t
  misc_feature (135)..(135): n is a, c, g, or t
  misc_feature (144)..(144): n is a, c, g, or t
  misc_feature (157)..(157): n is a, c, g, or t
  misc_feature (160)..(160): n is a, c, g, or t
  misc_feature (163)..(164): n is a, c, g, or t
  misc_feature (172)..(173): n is a, c, g, or t
  misc_feature (178)..(178): n is a, c, g, or t
  misc_feature (214)..(214): n is a, c, g, or t
  misc_feature (286)..(286): n is a, c, g, or t
gtgtactctgccacgctgatccaacctgtactgtcctgtgagctgactggtgaattccactcttgatgtggtttctgtgtagtgtgcatttggaagtgtcctagtagcctgttctagttagttanactnnanccntttcccatnaccttcagtggantcncanngcacacanntcatntcgatccttgtgggttggaatggggaggaggaagcnttttttttttttaattttttaaaaaatcatatctgctaatttaagagtgagatttgctttatggaagtcaantcaataaaaactgcattcgagttgcaaataccatttcacagtgaaatatttttgagtagagttctgttgctaggatattcgtgggcaagagttttatcagc

SEQ ID NO: 2710 - DNA, 387 bp, Mus musculus; identical to SEQ ID NO: 2709
  misc_feature (125)..(125): n is a, c, g, or t
  misc_feature (129)..(130): n is a, c, g, or t
  misc_feature (132)..(132): n is a, c, g, or t
  misc_feature (135)..(135): n is a, c, g, or t
  misc_feature (144)..(144): n is a, c, g, or t
  misc_feature (157)..(157): n is a, c, g, or t
  misc_feature (160)..(160): n is a, c, g, or t
  misc_feature (163)..(164): n is a, c, g, or t
  misc_feature (172)..(173): n is a, c, g, or t
  misc_feature (178)..(178): n is a, c, g, or t
  misc_feature (214)..(214): n is a, c, g, or t
  misc_feature (286)..(286): n is a, c, g, or t

SEQ ID NO: 2711 - DNA, 459 bp, Mus musculus
  misc_feature (145)..(156): n is a, c, g, or t
  misc_feature (158)..(158): n is a, c, g, or t
  misc_feature (160)..(162): n is a, c, g, or t
  misc_feature (168)..(168): n is a, c, g, or t
  misc_feature (397)..(397): n is a, c, g, or t
  misc_feature (399)..(399): n is a, c, g, or t
  misc_feature (416)..(416): n is a, c, g, or t
  misc_feature (418)..(418): n is a, c, g, or t
  misc_feature (421)..(421): n is a, c, g, or t
cggatgacttgctgcgggcatccagtgtggagctggaggtgctgggccagggcgaggaggggccgagctgcgagctgggcactgcagcctaggcctgcatgcctcgggtctgagcgcagcactgggaggagatgctaaaaaaccnnnnnnnnnnnntngnnntgtggnaccaactgcacctgtagtcggccacctgccaccggccactgaccgtctttcttggacacagtcatcttccaggctcagctgtcagtcatccctcgtgctctgtccacatgcctatacccaaagacagatgcagacgtgttggctgaggccaagacctcattcctctcttactgtattcccaatactaaaaagtgagcggtggcgccaggacagtgagtgggactggcantnagaagactgtatcatgntnatntgtgttatggaaaaagatatgtgccaggtaccctcagt

SEQ ID NO: 2712 - DNA, 459 bp, Mus musculus; identical to SEQ ID NO: 2711
  misc_feature (145)..(156): n is a, c, g, or t
  misc_feature (158)..(158): n is a, c, g, or t
  misc_feature (160)..(162): n is a, c, g, or t
  misc_feature (168)..(168): n is a, c, g, or t
  misc_feature (397)..(397): n is a, c, g, or t
  misc_feature (399)..(399): n is a, c, g, or t
  misc_feature (416)..(416): n is a, c, g, or t
  misc_feature (418)..(418): n is a, c, g, or t
  misc_feature (421)..(421): n is a, c, g, or t

SEQ ID NO: 2713 - DNA, 452 bp, Mus musculus
  misc_feature (47)..(47): n is a, c, g, or t
  misc_feature (93)..(93): n is a, c, g, or t
ccctttgaagatggtaagtaattcttattatctacatattaaaaggntgccctttggtcagagactctaacagtatttgaagacaggctctantcttaataagctcttggcatactaagcaagcaaatgaaaacttagagctcatggggatctttttttttgcacatcaccttggtcacctttcaccagttttccgtgtgacatgggttacctatacagctgtaggtctaagtggtctgtgttacaaaatggttgatgtttgggcggcctaatagaggtgctccctgggcactgctaccaagtgggtaactgtttccttgctttcttgtctgcattcataagggtgttgtaaaattttccatttcttttctccctattactagggaataaatccagagcttggtatgttctagggaggcactccactgccaggcatccctgagtcctgaatt

SEQ ID NO: 2714 - DNA, 452 bp, Mus musculus; identical to SEQ ID NO: 2713
  misc_feature (47)..(47): n is a, c, g, or t
  misc_feature (93)..(93): n is a, c, g, or t

SEQ ID NO: 2715 - DNA, 562 bp, Mus musculus
  misc_feature (308)..(308): n is a, c, g, or t
  misc_feature (310)..(315): n is a, c, g, or t
  misc_feature (317)..(317): n is a, c, g, or t
  misc_feature (320)..(320): n is a, c, g, or t
  misc_feature (326)..(326): n is a, c, g, or t
  misc_feature (435)..(435): n is a, c, g, or t
  misc_feature (446)..(446): n is a, c, g, or t
  misc_feature (468)..(468): n is a, c, g, or t
  misc_feature (479)..(479): n is a, c, g, or t
  misc_feature (481)..(481): n is a, c, g, or t
  misc_feature (483)..(483): n is a, c, g, or t
  misc_feature (498)..(498): n is a, c, g, or t
  misc_feature (516)..(516): n is a, c, g, or t
cttggtgaaggagcagcgtgtataccaggaggccaccaaggagatcccaaccacggatattgacttcttctgtgaataagaaattaattaaaacagcagataaaacagaaacaccagtgatgaagaagagaagaagtggaaataactgaacctgtgtatctgtaccttcctggctttatttggtggcaggaggttggatcttgaaggtgctaagatatggaaattgtcaactcagtcttgtttactcttgccccggtctttccaccaactgcgactacgtgctgtgtgaatcatataggtcatttatnannnnnnanttngctttnagcgaggagaatctttatttactcagtgatgaacatataaggtgttttatctgtagttatttctaaatggtcattctccccagctctgactccatgtccttaagcttgntgagttagaantctgacttttgggtgtgttttntgttatttgtntntntggtcatgtgaagtnttaataatgtatttgtcntgataacttcctattgttactttttatatctgatgcccttggatag

SEQ ID NO: 2716 - DNA, 562 bp, Mus musculus; identical to SEQ ID NO: 2715
  misc_feature (308)..(308): n is a, c, g, or t
  misc_feature (310)..(315): n is a, c, g, or t
  misc_feature (317)..(317): n is a, c, g, or t
  misc_feature (320)..(320): n is a, c, g, or t
  misc_feature (326)..(326): n is a, c, g, or t
  misc_feature (435)..(435): n is a, c, g, or t
  misc_feature (446)..(446): n is a, c, g, or t
  misc_feature (468)..(468): n is a, c, g, or t
  misc_feature (479)..(479): n is a, c, g, or t
  misc_feature (481)..(481): n is a, c, g, or t
  misc_feature (483)..(483): n is a, c, g, or t
  misc_feature (498)..(498): n is a, c, g, or t
  misc_feature (516)..(516): n is a, c, g, or t

SEQ ID NO: 2717 - DNA, 41 bp, Mus musculus
actatgtcccaagatcagacccatggataatggacagatat

SEQ ID NO: 2718 - DNA, 281 bp, Mus musculus
  misc_feature (111)..(111): n is a, c, g, or t
  misc_feature (245)..(245): n is a, c, g, or t
cagctcatggagtcataagtgagagggtagacaaggaatgagccctgaaccttctctgagttgtacaggtgggtttctgtgctgtggtttctgctgacagaccagaggatnagcccagccttcttgaagacttgaagacaaacaagtcttaagttagagggatgaggggaagtaggagtcacaaacctgctcacatttatttttgtcttaagtctgcatcagaagatgcagaaagcagtgttatntatcaatagggcatgattagccctgctgatttgaga

SEQ ID NO: 2719 - DNA, 70 bp, Mus musculus
ggttttggcaaactatgttgaattggatttcaaaaaaaccattttgcttcaaacttaagcattccctttg

SEQ ID NO: 2720 - DNA, 57 bp, Mus musculus
cacagacccatacagctggactcttttatcgcatgctaatcgagacccactgttcag

SEQ ID NO: 2721 - DNA, 327 bp, Mus musculus
  misc_feature (81)..(103): n is a, c, g, or t
  misc_feature (164)..(164): n is a, c, g, or t
atgatagccctgaggatgtgaagcggcgggccatggctgaccctgaggtgcagcagataatgagtgacccagccatgagannnnnnnnnnnnnnnnnnnnnnnggacccccaggctctgagcgaacacttaaagaatcctgtaatagcgcagaagatccagaangctgatggatgtgggtctcatcgcaattcggtgataacttgcttttccccctcttcccttcgccaatgaggaaggcgagctgggaaggtggcgagcagcactgggcagagggggggagaagaaaggcttatctttatatttatacatgcctacaaggaagaca

SEQ ID NO: 2722 - DNA, 327 bp, Mus musculus; identical to SEQ ID NO: 2721
  misc_feature (81)..(103): n is a, c, g, or t
  misc_feature (164)..(164): n is a, c, g, or t

SEQ ID NO: 2723 - DNA, 208 bp, Mus musculus
  misc_feature (152)..(167): n is a, c, g, or t
  misc_feature (175)..(175): n is a, c, g, or t
  misc_feature (177)..(177): n is a, c, g, or t
ggaagtctttctgtctttctccatcagtctgaaagccttagttcccacagaggacggatctgtcactcctaggggctgggcatatgtcggcctcttgtgccaaggccaggcaagcagctccaggtcctgaccagtttgcacacacactctgnnnnnnnnnnnnnnnntttttctntngtctctgctatgtcactgaattaaccactgt

SEQ ID NO: 2724 - DNA, 208 bp, Mus musculus; identical to SEQ ID NO: 2723
  misc_feature (152)..(167): n is a, c, g, or t
  misc_feature (175)..(175): n is a, c, g, or t
  misc_feature (177)..(177): n is a, c, g, or t

SEQ ID NO: 2725 - DNA, 578 bp, Mus musculus
gtggtgctctcgtctcttcagctcaagtgctatagaaagcccgacctagagagatatgaggcccaggcccacggccgcatgaagcccctgagtgcctcccaagtcagcgtgcacattggcatggatgaccggcgtcgggattctcccagggccaccgcgtgggaccaggtcagctacgtgagccaagtgtctctgtcctccctgacgtcagacagattgtctcggcatggcggggcagcagaggacggtggcgacaaatggtccctgctcctgagtgacagggatgaagagcagtgcatctgagtgttctcctgggcaggccatggcgctccttctgggtgagcctgctcctgctcatggtggtggagccaggaggtgcagccttaacaagccactgtgggatggacgaagctcatggtgagacctgagcatcctgctagccttgccttacagtgtgtggtgtatctgcagaggctgggcaggattgctcttccagaagccactaggttggggaaagtataccattcctgcttttcatgagggcgagatcacaccctgcttgggaggaaaccatcact

SEQ ID NO: 2726 - DNA, 578 bp, Mus musculus; identical to SEQ ID NO: 2725

SEQ ID NO: 2727 - DNA, 211 bp, Mus musculus
  misc_feature (78)..(79): n is a, c, g, or t
  misc_feature (81)..(86): n is a, c, g, or t
  misc_feature (88)..(88): n is a, c, g, or t
  misc_feature (109)..(109): n is a, c, g, or t
  misc_feature (115)..(115): n is a, c, g, or t
  misc_feature (158)..(158): n is a, c, g, or t
  misc_feature (160)..(160): n is a, c, g, or t
gaactgacagctagccgtcagagcttccacatggccatgggcaaccccagtgagttttttgtggatgttatgtagggnncnnnnnngnggccacattgggtctgtgccnttggcntggcaagtttcagcctggtgcccttcatagtgcctgggctcancntggcggctggtgcctaccaaaacgtttttgccactgtgactctcaccagca

SEQ ID NO: 2728 - DNA, 211 bp, Mus musculus; identical to SEQ ID NO: 2727
  misc_feature (78)..(79): n is a, c, g, or t
  misc_feature (81)..(86): n is a, c, g, or t
  misc_feature (88)..(88): n is a, c, g, or t
  misc_feature (109)..(109): n is a, c, g, or t
  misc_feature (115)..(115): n is a, c, g, or t
  misc_feature (158)..(158): n is a, c, g, or t
  misc_feature (160)..(160): n is a, c, g, or t

SEQ ID NO: 2729 - DNA, 364 bp, Mus musculus
  misc_feature (119)..(119): n is a, c, g, or t
  misc_feature (241)..(255): n is a, c, g, or t
gctctcagatcagtaaaatctgtacttgaaattaaggttgcaaaatcagtttatatggattctaaatttctcatacaaagtgaaaatcttattaaatggaaaaaatttaaatgctaacnacagcaagttatttttaattaacatctctagactggaagcttactgatagccaagggacctgagattgtgatctgctttctcaggactctccctgggtttcctataactgggtcacagaagnnnnnnnnnnnnnnngcctgtcagcctttggttgcttagtcctgggtgtggccaggcagatagccttctagcacccaggcatggtaacagccagatgtggtgtgggccaagtgccactgtgttc

SEQ ID NO: 2730 - DNA, 364 bp, Mus musculus; identical to SEQ ID NO: 2729
  misc_feature (119)..(119): n is a, c, g, or t
  misc_feature (241)..(255): n is a, c, g, or t

SEQ ID NO: 2731 - DNA, 478 bp, Mus musculus
  misc_feature (121)..(121): n is a, c, g, or t
  misc_feature (126)..(126): n is a, c, g, or t
  misc_feature (128)..(128): n is a, c, g, or t
  misc_feature (170)..(170): n is a, c, g, or t
  misc_feature (176)..(190): n is a, c, g, or t
  misc_feature (206)..(206): n is a, c, g, or t
  misc_feature (208)..(208): n is a, c, g, or t
  misc_feature (234)..(234): n is a, c, g, or t
  misc_feature (236)..(236): n is a, c, g, or t
  misc_feature (249)..(249): n is a, c, g, or t
  misc_feature (258)..(258): n is a, c, g, or t
  misc_feature (260)..(260): n is a, c, g, or t
  misc_feature (273)..(273): n is a, c, g, or t
  misc_feature (388)..(388): n is a, c, g, or t
  misc_feature (390)..(395): n is a, c, g, or t
  misc_feature (398)..(398): n is a, c, g, or t
  misc_feature (400)..(400): n is a, c, g, or t
  misc_feature (402)..(409): n is a, c, g, or t
  misc_feature (412)..(412): n is a, c, g, or t
  misc_feature (414)..(414): n is a, c, g, or t
  misc_feature (447)..(448): n is a, c, g, or t
cgcaatgatgcttctatgtcccccaaggcccttgggaggagagctgcacagcattcaggcctcataccaggcagacactgggtgtgggtcggccacccagtcctgctcctcactcagggtnccagntntgccttgaattttgtgaacaccagcacatacctccttgtgcntctgtnnnnnnnnnnnnnnnactgcaggggaatgantntcactcacaccctccctgcatggagntnccagcgagtggantcagaggantntatcagaatgatntggcaatcctagccccagcctccggagcacacccatctttccttaggctgggttacctgggaaagccacacttttacttctttccctgacaggaaataaaagccacatttacccnannnnnnccnanannnnnnnnctntntgaactgttttccactcgaaatgacgacatgannactattctctgtccagtgtttatggtgtga

SEQ ID NO: 2732 - DNA, 478 bp, Mus musculus; identical to SEQ ID NO: 2731
  misc_feature (121)..(121): n is a, c, g, or t
  misc_feature (126)..(126): n is a, c, g, or t
  misc_feature (128)..(128): n is a, c, g, or t
  misc_feature (170)..(170): n is a, c, g, or t
  misc_feature (176)..(190): n is a, c, g, or t
  misc_feature (206)..(206): n is a, c, g, or t
  misc_feature (208)..(208): n is a, c, g, or t
  misc_feature (234)..(234): n is a, c, g, or t
  misc_feature (236)..(236): n is a, c, g, or t
  misc_feature (249)..(249): n is a, c, g, or t
  misc_feature (258)..(258): n is a, c, g, or t
  misc_feature (260)..(260): n is a, c, g, or t
  misc_feature (273)..(273): n is a, c, g, or t
  misc_feature (388)..(388): n is a, c, g, or t
  misc_feature (390)..(395): n is a, c, g, or t
  misc_feature (398)..(398): n is a, c, g, or t
  misc_feature (400)..(400): n is a, c, g, or t
  misc_feature (402)..(409): n is a, c, g, or t
  misc_feature (412)..(412): n is a, c, g, or t
  misc_feature (414)..(414): n is a, c, g, or t
  misc_feature (447)..(448): n is a, c, g, or t

SEQ ID NO: 2733 - DNA, 473 bp, Mus musculus
  misc_feature (30)..(30): n is a, c, g, or t
  misc_feature (66)..(66): n is a, c, g, or t
  misc_feature (71)..(71): n is a, c, g, or t
  misc_feature (73)..(73): n is a, c, g, or t
  misc_feature (216)..(216): n is a, c, g, or t
  misc_feature (233)..(233): n is a, c, g, or t
  misc_feature (235)..(236): n is a, c, g, or t
  misc_feature (238)..(239): n is a, c, g, or t
  misc_feature (241)..(243): n is a, c, g, or t
  misc_feature (245)..(260): n is a, c, g, or t
  misc_feature (271)..(289): n is a, c, g, or t
gaatgagccagataccaacaagataaaatntcagtaaaataatttaacagttagcttggaagctgntcagntntgggggattaagggcaaattatgctgtcatgaactgtcccacactgacgtctgccaaagcgaatatgaactttggtagatccattgtctgttctatttatttttccagtgaaaagtattttgatagagcttttcattttatanatacactgagttaaccnannannannnannnnnnnnnnnnnnnngaatactatgnnnnnnnnnnnnnnnnnnncgattaatgtacctgttggtgtccttggaacacacggtggtgttattgtgtgagcaccgtggaggggtcgcgccctcgcttacatgatgtgttattggagatgggattgtgttgcttcggagatggcgctgcttgaaaacgcagctctaggactgcgtggtctcgggttcagtgcgaagttgcc

SEQ ID NO: 2734 - DNA, 473 bp, Mus musculus; identical to SEQ ID NO: 2733
  misc_feature (30)..(30): n is a, c, g, or t
  misc_feature (66)..(66): n is a, c, g, or t
  misc_feature (71)..(71): n is a, c, g, or t
  misc_feature (73)..(73): n is a, c, g, or t
  misc_feature (216)..(216): n is a, c, g, or t
  misc_feature (233)..(233): n is a, c, g, or t
  misc_feature (235)..(236): n is a, c, g, or t
  misc_feature (238)..(239): n is a, c, g, or t
  misc_feature (241)..(243): n is a, c, g, or t
  misc_feature (245)..(260): n is a, c, g, or t
  misc_feature (271)..(289): n is a, c, g, or t

SEQ ID NO: 2735 - DNA, 390 bp, Mus musculus
  misc_feature (32)..(57): n is a, c, g, or t
  misc_feature (130)..(146): n is a, c, g, or t
  misc_feature (244)..(244): n is a, c, g, or t
  misc_feature (292)..(292): n is a, c, g, or t
caggagggttctttgtagtgagcactccccannnnnnnnnnnnnnnnnnnnnnnnnnatggatggctggtgactgggccttgtgctcccaagctctggtccgagctggagtttccctgatgtcccagagnnnnnnnnnnnnnnnnnatccgatgaaattatttctggtgacctcatcaaaaataaataaataaataaacaaataaacaaatcccagtattccaggtgagggctttgggaagccntccagataactcttgttgctcttagcaaccccaccattgggcattgcnatgtagagaggaggcaggcccaaagtggcctgttgtcatagcaactggaggcagtggggcagtgaacagaataacaacagcaacaatgcctttgcagg

SEQ ID NO: 2736 - DNA, 390 bp, Mus musculus; identical to SEQ ID NO: 2735
  misc_feature (32)..(57): n is a, c, g, or t
  misc_feature (130)..(146): n is a, c, g, or t
  misc_feature (244)..(244): n is a, c, g, or t
  misc_feature (292)..(292): n is a, c, g, or t

SEQ ID NO: 2737 - DNA, 259 bp, Mus musculus
aagactgcttgtctttttcactgtttttaaaagataattccagtctgtttgcatctatgtaaagccccatcctgactcaagcctgtcagacacaagatgttagaatttgtttaaaataaagggagatcaaaacagctgtcatagaacaagggggatgctaactaatgcagttacagcattgaaagatggattctttgctcaggctagaagggagcagttgctttctggcttgagtcggctttggttagcacaggatgct

SEQ ID NO: 2738 - DNA, 259 bp, Mus musculus; identical to SEQ ID NO: 2737

SEQ ID NO: 2739 - DNA, 309 bp, Mus musculus
  misc_feature (89)..(233): n is a, c, g, or t
gaattgcttgctacggcctggcagccctgcccaagtggtccagtgtatctcggagctgggtatttttggagtctatgtcagacagggannnnnnnnnnnnnnnnnnnnnnnnnnnnnnnnnnnnnnnnnnnnnnnnnnnnnnnnnnnnnnnnnnnnnnnnnnnnnnnnnnnnnnnnnnnnnnnnnnnnnnnnnnnnnnnnnnnnnnnnnnnnnnnnnnnnnnnnnnnnnnnnnccttctatcccctgtacttggcactcctcttctgaggggttgcccctgtccctatcttaggggagcttgtctcttc

SEQ ID NO: 2740 - DNA, 309 bp, Mus musculus; identical to SEQ ID NO: 2739
  misc_feature (89)..(233): n is a, c, g, or t

SEQ ID NO: 2741 - DNA, 535 bp, Mus musculus
atgtcaccctgaggtgctgggccctgggcttctaccctgctgacatcaccctgacctggcagttgaatggggaggagctgactcaggacatggagcttgtggagaccaggcctgcaggggatggaaccttccagaagtgggcagctgtggtggtgcctcttgggaaggagcagaattacacatgccatgtgtaccatgaggggctgcctgagcccctcaccctgagatgggagcctcctccatccaccggctccaacatggtaaacatagctgttctggttgtccttggagctgtgatcatcattgaagctatggtggcttttgtgttgaagagcagcagaaaaatagccatccttcctggtccagcaggcactaagggatcatctgcatcctgacagctccatgctgccctgagctgcagctcctcactaccacactgaacataagaatctgaatgtgaacttgattgctcaaatctttgagctgagggttgattagtggagtgacataactcaaagtgctgaagcagaaataa

SEQ ID NO: 2742 - DNA, 535 bp, Mus musculus; identical to SEQ ID NO: 2741

SEQ ID NO: 2743 - DNA, 488 bp, Mus musculus
  misc_feature (398)..(412): n is a, c, g, or t
ttcgctgacaccaggccagctcgtgggggtgaggccgtggcttgcaacctgcactggcctcacccggcctggtctgcggtctttgtgatctatacttttttgttgggcttcctacccccggttctggccatcggattatgctacctgcttattgtgggcaagatgcgcgctgtggccctgcgcggtggctggcaacaacggaggcgctcagagaagaagatcactaggctcgtgctaatggtggtgaccgtctttgtgctatgctggatgcctttctatgtggtgcagcttctgaacctgtttgtcaccagcctcgatgccactgtcaaccatgtgtccctcatcctgagctatgccaacagctgtgccaatcccattctctatggcttcctctctgnnnnnnnnnnnnnnnctttccagcgggttctgtgcctgcgctgctgtctcctggaaacaactggaggtgctgaggaagagcccctggacta

SEQ ID NO: 2744 - DNA, 488 bp, Mus musculus; identical to SEQ ID NO: 2743
  misc_feature (398)..(412): n is a, c, g, or t

SEQ ID NO: 2745 - DNA, 455 bp, Mus musculus
  misc_feature (163)..(202): n is a, c, g, or t
  misc_feature (321)..(321): n is a, c, g, or t
  misc_feature (327)..(327): n is a, c, g, or t
  misc_feature (369)..(369): n is a, c, g, or t
  misc_feature (372)..(372): n is a, c, g, or t
  misc_feature (374)..(374): n is a, c, g, or t
  misc_feature (382)..(382): n is a, c, g, or t
  misc_feature (392)..(392): n is a, c, g, or t
  misc_feature (402)..(402): n is a, c, g, or t
cttttcaggcaataggaaagtgcatgaggagagttttgaatgtgcatatgctgacgcctgagaacagacccaggtacccgtggctgagctgagcttcctctgctttccctaggcctggcctctgcagggaactgcagcacacactgcactcccacctgctctnnnnnnnnnnnnnnnnnnnnnnnnnnnnnnnnnnnnnnnnacaacccgtgtttcctttattaaaagtgattagtacaactgctagttattttcaacaaataaagccattatgttaagaggggactgtccatagtgagtgaaaggtggcaggcaggggcntacagntcctagggaatggagaattcatgtgaagccgaatgaaggatnttntnttatactntccccctttntaatggccantctttagtgtttgtgtctaatgttaatgcttaaagcacaggacccccatgtag

SEQ ID NO: 2746 - DNA, 455 bp, Mus musculus; identical to SEQ ID NO: 2745
  misc_feature (163)..(202): n is a, c, g, or t
  misc_feature (321)..(321): n is a, c, g, or t
  misc_feature (327)..(327): n is a, c, g, or t
  misc_feature (369)..(369): n is a, c, g, or t
  misc_feature (372)..(372): n is a, c, g, or t
  misc_feature (374)..(374): n is a, c, g, or t
  misc_feature (382)..(382): n is a, c, g, or t
  misc_feature (392)..(392): n is a, c, g, or t
  misc_feature (402)..(402): n is a, c, g, or t

SEQ ID NO: 2747 - DNA, 287 bp, Mus musculus
  misc_feature (93)..(93): n is a, c, g, or t
  misc_feature (104)..(105): n is a, c, g, or t
  misc_feature (108)..(110): n is a, c, g, or t
  misc_feature (113)..(113): n is a, c, g, or t
  misc_feature (120)..(120): n is a, c, g, or t
  misc_feature (208)..(249): n is a, c, g, or t
cctggagctgtataaggtggtaagcgggctccgatcccatggtacctttcgtcacagctatctgcacctggctgaaaaccacttcatccgctnagcgccttctnnccnnnccntccagtngttccgtgacctgaaatggacctgttgggaccgcctgaaggtgcccgctgtgcagcctgaaaggacactgaagtcactgctggcccannnnnnnnnnnnnnnnnnnnnnnnnnnnnnnnnnnnnnnnnnccaccaggctctgctctattcttcaggatggtcatctg

SEQ ID NO: 2748 - DNA, 287 bp, Mus musculus; identical to SEQ ID NO: 2747
  misc_feature (93)..(93): n is a, c, g, or t
  misc_feature (104)..(105): n is a, c, g, or t
  misc_feature (108)..(110): n is a, c, g, or t
  misc_feature (113)..(113): n is a, c, g, or t
  misc_feature (120)..(120): n is a, c, g, or t
  misc_feature (208)..(249): n is a, c, g, or t

SEQ ID NO: 2749 - DNA, 496 bp, Mus musculus
  misc_feature (172)..(175): n is a, c, g, or t
  misc_feature (181)..(183): n is a, c, g, or t
  misc_feature (185)..(185): n is a, c, g, or t
  misc_feature (205)..(221): n is a, c, g, or t
  misc_feature (366)..(366): n is a, c, g, or t
  misc_feature (430)..(430): n is a, c, g, or t
  misc_feature (442)..(442): n is a, c, g, or t
  misc_feature (454)..(456): n is a, c, g, or t
  misc_feature (458)..(458): n is a, c, g, or t
aaaccctgggcacccctatgagtgaaccatgtcacatctggctgaggtgtggagtgccatgtgtatctggacccagaccagagaggacctggacctcctagaggcctcattctgggagaactagggtgctcagcctccagccacggatctggcaaggcccttcactgctctnnnntttttnnntnttgaaatagacattttattnnnnnnnnnnnnnnnnncaaaaatatgacaaaataaattaaaaacaaataaataaccgcccatcctgtgtatttttctgtattgtggggggtctgctcgaggcccccatcctggtcgggagaacggcaggggcgcggcggggctagtggcgggctgtgggcnagcaggcaggctgtgcaggggcatccgctgggacatccgcggggacacggggcgggttgtcgcngcagccccaggncgcgtcccagcnnnancagccagcaggaggcgaggcggaccctgcggagggaga

SEQ ID NO: 2750 - DNA, 496 bp, Mus musculus; identical to SEQ ID NO: 2749
  misc_feature (172)..(175): n is a, c, g, or t
  misc_feature (181)..(183): n is a, c, g, or t
  misc_feature (185)..(185): n is a, c, g, or t
  misc_feature (205)..(221): n is a, c, g, or t
  misc_feature (366)..(366): n is a, c, g, or t
  misc_feature (430)..(430): n is a, c, g, or t
  misc_feature (442)..(442): n is a, c, g, or t
  misc_feature (454)..(456): n is a, c, g, or t
  misc_feature (458)..(458): n is a, c, g, or t

SEQ ID NO: 2751 - DNA, 507 bp, Mus musculus
  misc_feature (27)..(27): n is a, c, g, or t
  misc_feature (37)..(113): n is a, c, g, or t
  misc_feature (149)..(149): n is a, c, g, or t
  misc_feature (328)..(328): n is a, c, g, or t
  misc_feature (398)..(398): n is a, c, g, or t
  misc_feature (400)..(401): n is a, c, g, or t
  misc_feature (409)..(409): n is a, c, g, or t
  misc_feature (413)..(413): n is a, c, g, or t
  misc_feature (418)..(418): n is a, c, g, or t
  misc_feature (429)..(429): n is a, c, g, or t
  misc_feature (446)..(446): n is a, c, g, or t
  misc_feature (458)..(458): n is a, c, g, or t
  misc_feature (462)..(462): n is a, c, g, or t
  misc_feature (481)..(481): n is a, c, g, or t
ggctgtcgagtgctgccggtctcctangggagcaagnnnnnnnnnnnnnnnnnnnnnnnnnnnnnnnnnnnnnnnnnnnnnnnnnnnnnnnnnnnnnnnnnnnnnnnnnnnnnttctgagagcctcccttgccccatacggacaccccnagccttgaaggctgggcgcctgccccccactggggtgaggggggcaggcgatgggcacccgccaaaaggcctggggcgcagctcacacactggactccggcccgcccgcctgcgcccagtccttccacctcgaggtttacatggcccccttccagcgtattttgtatgttttttttttntgcaaagagactgaattcatattgaatataatatatttgtgtatttaacagggaggggagaagggggctntnncggcgganctgnccccnccgcttggtantcagcctgcggggatantagggagggacntccngccccctgccctccccctntgcatagtactgtggagaagaaacac

SEQ ID NO: 2752 - DNA, 507 bp, Mus musculus; identical to SEQ ID NO: 2751
  misc_feature (27)..(27): n is a, c, g, or t
  misc_feature (37)..(113): n is a, c, g, or t
  misc_feature (149)..(149): n is a, c, g, or t
  misc_feature (328)..(328): n is a, c, g, or t
  misc_feature (398)..(398): n is a, c, g, or t
  misc_feature (400)..(401): n is a, c, g, or t
  misc_feature (409)..(409): n is a, c, g, or t
  misc_feature (413)..(413): n is a, c, g, or t
  misc_feature (418)..(418): n is a, c, g, or t
  misc_feature (429)..(429): n is a, c, g, or t
  misc_feature (446)..(446): n is a, c, g, or t
  misc_feature (458)..(458): n is a, c, g, or t
  misc_feature (462)..(462): n is a, c, g, or t
  misc_feature (481)..(481): n is a, c, g, or t

SEQ ID NO: 2753 - DNA, 553 bp, Mus musculus
  misc_feature (29)..(29): n is a, c, g, or t
  misc_feature (39)..(115): n is a, c, g, or t
  misc_feature (151)..(151): n is a, c, g, or t
  misc_feature (330)..(330): n is a, c, g, or t
  misc_feature (400)..(400): n is a, c, g, or t
  misc_feature (402)..(403): n is a, c, g, or t
  misc_feature (411)..(411): n is a, c, g, or t
  misc_feature (415)..(415): n is a, c, g, or t
  misc_feature (420)..(420): n is a, c, g, or t
  misc_feature (431)..(431): n is a, c, g, or t
  misc_feature (448)..(448): n is a, c, g, or t
  misc_feature (460)..(460): n is a, c, g, or t
  misc_feature (464)..(464): n is a, c, g, or t
  misc_feature (483)..(483): n is a, c, g, or t
  misc_feature (516)..(516): n is a, c, g, or t
  misc_feature (519)..(519): n is a, c, g, or t
  misc_feature (521)..(521): n is a, c, g, or t
  misc_feature (528)..(528): n is a, c, g, or t
ggggctgtcgagtgctgccggtctcctangggagcaagnnnnnnnnnnnnnnnnnnnnnnnnnnnnnnnnnnnnnnnnnnnnnnnnnnnnnnnnnnnnnnnnnnnnnnnnnnnnnttctgagagcctcccttgccccatacggacaccccnagccttgaaggctgggcgcctgccccccactggggtgaggggggcaggcgatgggcacccgccaaaaggcctggggcgcagctcacacactggactccggcccgcccgcctgcgcccagtccttccacctcgaggtttacatggcccccttccagcgtattttgtatgttttttttttntgcaaagagactgaattcatattgaatataatatatttgtgtatttaacagggaggggagaagggggctntnncggcgganctgnccccnccgcttggtantcagcctgcggggatantagggagggacntccngccccctgccctccccctntgcatagtactgtggagaagaaacacgcacttngtntntaaagtntattttaagatgtgtttgtgtgtgt

SEQ ID NO: 2754 - DNA, 553 bp, Mus musculus; identical to SEQ ID NO: 2753
  misc_feature (29)..(29): n is a, c, g, or t
  misc_feature (39)..(115): n is a, c, g, or t
  misc_feature (151)..(151): n is a, c, g, or t
  misc_feature (330)..(330): n is a, c, g, or t
  misc_feature (400)..(400): n is a, c, g, or t
  misc_feature (402)..(403): n is a, c, g, or t
  misc_feature (411)..(411): n is a, c, g, or t
  misc_feature (415)..(415): n is a, c, g, or t
  misc_feature (420)..(420): n is a, c, g, or t
  misc_feature (431)..(431): n is a, c, g, or t
  misc_feature (448)..(448): n is a, c, g, or t
  misc_feature (460)..(460): n is a, c, g, or t
  misc_feature (464)..(464): n is a, c, g, or t
  misc_feature (483)..(483): n is a, c, g, or t
  misc_feature (516)..(516): n is a, c, g, or t
  misc_feature (519)..(519): n is a, c, g, or t
  misc_feature (521)..(521): n is a, c, g, or t
  misc_feature (528)..(528): n is a, c, g, or t

SEQ ID NO: 2755 - DNA, 351 bp, Mus musculus
  misc_feature (150)..(150): n is a, c, g, or t
  misc_feature (176)..(191): n is a, c, g, or t
tttctgacttggtggtcactgcggcgaaatcacgtgaccttagcaaatcgccgagcacttaggagtagactgttaactcgggcccagagttctgccctgcccttttaaagtatctgaagattgttgaataccacatgatttatttatttnctttgatgtttatagagtatagaagnnnnnnnnnnnnnnnntgaagtctaagagtgcatggcagacatgagattttgaacatccatcccaaaatacagtacttgatacagtacagaaataatgtggagcaagctgaaaaagtactgaaactggtcatttttgatatattttataatgaatcttttgtcaggccgaggcatg

SEQ ID NO: 2756 - DNA, 351 bp, Mus musculus; identical to SEQ ID NO: 2755
  misc_feature (150)..(150): n is a, c, g, or t
  misc_feature (176)..(191): n is a, c, g, or t

SEQ ID NO: 2757 - DNA, 451 bp, Mus musculus
  misc_feature (116)..(116): n is a, c, g, or t
  misc_feature (122)..(122): n is a, c, g, or t
  misc_feature (125)..(125): n is a, c, g, or t
  misc_feature (127)..(127): n is a, c, g, or t
  misc_feature (131)..(132): n is a, c, g, or t
  misc_feature (137)..(137): n is a, c, g, or t
  misc_feature (139)..(139): n is a, c, g, or t
  misc_feature (142)..(142): n is a, c, g, or t
  misc_feature (149)..(149): n is a, c, g, or t
  misc_feature (154)..(154): n is a, c, g, or t
  misc_feature (156)..(156): n is a, c, g, or t
  misc_feature (352)..(352): n is a, c, g, or t
tagctagtggtcctgatttgttccttataaaattgcatgttcataaaggccaagagtcaagtccttcaaggagatggcttgagatctgtggtttgacttaaaatcagtgctcctcnaggctncangnttanntagcnangcnccaaacnaacancnagaatagggtttgtgcaggacactgaggaaattcagagccagattatgtatttgatgtgaatgtgaggtttttcaagtgccagtgtcaaggagagccttctaattccccatagcttatgagcagtgtatctgttgtagcagctctaagtaacccattcttctttaaatacacggactctgatatgaatatttcatntctgtacaatgatggattccaccaggaaaggagttgttgctttctttgaagtaatttcttcccttttgctccctgttgctgaggcatactacttcataa

SEQ ID NO: 2758 - DNA, 451 bp, Mus musculus; identical to SEQ ID NO: 2757
  misc_feature (116)..(116): n is a, c, g, or t
  misc_feature (122)..(122): n is a, c, g, or t
  misc_feature (125)..(125): n is a, c, g, or t
  misc_feature (127)..(127): n is a, c, g, or t
  misc_feature (131)..(132): n is a, c, g, or t
  misc_feature (137)..(137): n is a, c, g, or t
  misc_feature (139)..(139): n is a, c, g, or t
  misc_feature (142)..(142): n is a, c, g, or t
  misc_feature (149)..(149): n is a, c, g, or t
  misc_feature (154)..(154): n is a, c, g, or t
  misc_feature (156)..(156): n is a, c, g, or t
  misc_feature (352)..(352): n is a, c, g, or t

SEQ ID NO: 2759 - DNA, 475 bp, Mus musculus
  misc_feature (245)..(259): n is a, c, g, or t
cctgcaaagccgtaacttgaaatgcatagccttatgtgaagtgatcacgtcacctgacctgcacaaacatggcgagatatgggttgtcccgaacacggatcatgtctgtacaagattcttttttgtttatgaagatggccaggtgggagatgccaatatcaacacacaagaaggaggtattcacaaagagatactccgtgtgattggtaatcagactgcgactggttaaaggaagaccacgtaannnnnnnnnnnnnnncttcctcgggttcaaagctggattttgaactgaagaagatgacaaaataatttattgttattataaacaaaattaaccctttgaatactgatttttttttcttttcttagtatttctaaatatttcattaaatgcctaaaatggtataagatttaccgattgtagggttatggaatctagtaaataaacattaaacagcacttaaactgaagtttg

SEQ ID NO: 2760 - DNA, 475 bp, Mus musculus; identical to SEQ ID NO: 2759
  misc_feature (245)..(259): n is a, c, g, or t

SEQ ID NO: 2761 - DNA, 310 bp, Mus musculus
  misc_feature (28)..(28): n is a, c, g, or t
  misc_feature (125)..(125): n is a, c, g, or t
  misc_feature (160)..(160): n is a, c, g, or t
cttgtgatagcctctgctaggggaggtntcattcagttcaatagcatttttaaccaaaccatattattagaaatggtcaaaataagtttagaaggaaattgttttatgtactttaaaaacaaatntcccagatgcattcatgaggaaataccgtactttntcttaatttaaaaaaaaaaaaaaaacactttaaaaaaggaaagaaacccacagtatacctttcccagaggctagcctggtgtggtcagtccagttttggaagcactgccccagccagacccttattctttcgtaagatcactggctggag

SEQ ID NO: 2762 - DNA, 310 bp, Mus musculus; identical to SEQ ID NO: 2761
  misc_feature (28)..(28): n is a, c, g, or t
  misc_feature (125)..(125): n is a, c, g, or t
  misc_feature (160)..(160): n is a, c, g, or t

SEQ ID NO: 2763 - DNA, 528 bp, Mus musculus
  misc_feature (130)..(161): n is a, c, g, or t
  misc_feature (164)..(164): n is a, c, g, or t
  misc_feature (303)..(304): n is a, c, g, or t
  misc_feature (306)..(310): n is a, c, g, or t
tctgtaatgtctctggaagccctcacctgagacaggccctcatgaggcatgcagctcaattgtctatgtccccagcctgtgtggggacaccgatgctatttattcagtttggggcaggagggaaagtagnnnnnnnnnnnnnnnnnnnnnnnnnnnnnnnnaangcaggactgtgagggccatgtggagcagtgctgagctgccagcccctgcctgcctgcctgcctgccttccctcatcacctaacctcacctgcttctcgcctgtcatttgaataaacagtgtttgtacagagaaaaaaannannnnnccagctccctcgctctgtagggctgcttcagcagtttgaagctccaaaaacttcctctcataatctaccagagaatccaggattcacattgcctggggttatctcctacctgctctgagccccgtgaccccgtgtggaactcttccaactggtggtttgcggggttaagttgaagctccaacccagaatgggcctggtctttaagaagccctgcctca

SEQ ID NO: 2764 - DNA, 528 bp, Mus musculus; identical to SEQ ID NO: 2763
  misc_feature (130)..(161): n is a, c, g, or t
  misc_feature (164)..(164): n is a, c, g, or t
  misc_feature (303)..(304): n is a, c, g, or t
  misc_feature (306)..(310): n is a, c, g, or t

SEQ ID NO: 2765 - DNA, 371 bp, Mus musculus
  misc_feature (63)..(100): n is a, c, g, or t
aacctgccaaagacgggtcaggaaggcagtgctaagggaaggctcctgcaggcctctgcagtnnnnnnnnnnnnnnnnnnnnnnnnnnnnnnnnnnnnnncttccctttatctctctgtcttgagtctagttaagaatttgttaccgtgagacagaattctctttcttagcctcctggccagatatttaaaaggaggggggtgggttactttttggtaggggaagcttaagttatggatagcaaagtgctaattgtattctttttttctgaaacctcatgtagcatttttcttcccttccaccctccatactttcccaggcttcatttcatgcccggcgtctcttcgctcacaccgctgcaggctgtttga

SEQ ID NO: 2766 - DNA, 371 bp, Mus musculus; identical to SEQ ID NO: 2765
  misc_feature (63)..(100): n is a, c, g, or t

SEQ ID NO: 2767 - DNA, 495 bp, Mus musculus
  misc_feature (112)..(112): n is a, c, g, or t
  misc_feature (156)..(156): n is a, c, g, or t
  misc_feature (450)..(450): n is a, c, g, or t
catgaatctacatttccgtggagatcaacagatgcttcccctgtcctggctacgagcctgcttctgtagacactgagttaatctcctcaggctgtaggtcctggcattggcnacgagcctggactttccctgttggacagcttctggcctctggcntttcccagttcctgttccttagcgggtcagtctgttgagcaccagtttgtggtgtttctggccatttgattctacctgtagcattatcctgtttctactagctgtcaggaggttccaaagcctacttaaacttgtgtaggtgacatttaaatgagcaatatgccgttcatctgaaaatagtagcacacagccatatgtaggatgtcattttctaaggactgtttcttcacagtgagcagagcaggcatagtggtggttctttcatctgagtctttggttttttatatctgattnccagtatggacgttgagtagtgtaagaatggtgctgctcctgaca

SEQ ID NO: 2768 - DNA, 495 bp, Mus musculus; identical to SEQ ID NO: 2767
  misc_feature (112)..(112): n is a, c, g, or t
  misc_feature (156)..(156): n is a, c, g, or t
  misc_feature (450)..(450): n is a, c, g, or t

SEQ ID NO: 2769 - DNA, 382 bp, Mus musculus
  misc_feature (31)..(31): n is a, c, g, or t
  misc_feature (41)..(41): n is a, c, g, or t
  misc_feature (49)..(49): n is a, c, g, or t
  misc_feature (77)..(77): n is a, c, g, or t
  misc_feature (85)..(85): n is a, c, g, or t
  misc_feature (89)..(89): n is a, c, g, or t
  misc_feature (100)..(100): n is a, c, g, or t
  misc_feature (114)..(114): n is a, c, g, or t
  misc_feature (129)..(129): n is a, c, g, or t
  misc_feature (143)..(143): n is a, c, g, or t
  misc_feature (163)..(163): n is a, c, g, or t
  misc_feature (289)..(289): n is a, c, g, or t
  misc_feature (311)..(311): n is a, c, g, or t
gggctacccagaatatacaaaagcaatgctnttgtaagatntgaaagantcctacaagcctaaggacgtggtccagntaaaatanacancaaatacaatnacacagctaaccanatacttagagatgcnatgttaaatatttnttttagcctgtttcaagtangtaggtacagattgttcacatcccaagagactctgtttcttaaaagtttgtaagaaaaaaaaatgatgtctaaaaacaaacagtacagtgtgtttattttttaggggaaactgaaatcagggctantgaaaataaaacttgatcattntaaccgcaatgcttgtttgtagaaatgtctgcatttccgtcctgatcataagtattcttatctcagtgatg

SEQ ID NO: 2770 - DNA, 382 bp, Mus musculus; identical to SEQ ID NO: 2769
  misc_feature (31)..(31): n is a, c, g, or t
  misc_feature (41)..(41): n is a, c, g, or t
  misc_feature (49)..(49): n is a, c, g, or t
  misc_feature (77)..(77): n is a, c, g, or t
  misc_feature (85)..(85): n is a, c, g, or t
  misc_feature (89)..(89): n is a, c, g, or t
  misc_feature (100)..(100): n is a, c, g, or t
  misc_feature (114)..(114): n is a, c, g, or t
  misc_feature (129)..(129): n is a, c, g, or t
  misc_feature (143)..(143): n is a, c, g, or t
  misc_feature (163)..(163): n is a, c, g, or t
  misc_feature (289)..(289): n is a, c, g, or t
  misc_feature (311)..(311): n is a, c, g, or t

SEQ ID NO: 2771 - DNA, 554 bp, Mus musculus
  misc_feature (347)..(347): n is a, c, g, or t
  misc_feature (382)..(382): n is a, c, g, or t
  misc_feature (451)..(451): n is a, c, g, or t
tgtaactcctggatcccctgaggatcttcccacactggaggtttagccttctgaagaatcaggtcgctagtgttcaccttttcttctgtgtgcctagcatcgggaaggatgtgaataagccatttaaattaatagttagatgatgtatcagtatacatatttttagcagcaaaccttattttttaaaatataaagtattggcttggcagtctagctcagcatgtctaacatatccagtgctggctaatttgaacgatagtctaagatttggctgccaattaatgatgaatggtaaccaaagttttatttttaaattttaaaaagaggtttgggttatgttttgcttntctgaaattgtattcttgtgttttgtgtagtatcnacacatgttgtaataagccaaataatagtctgtcttgagtccttgtacatatttctgtgtagctataantactgtatcactttcattattaatgtacaaaatataaatgtagatttatccagtggctatgttaaaaaacttaagtaatgaatttgccaattttcaggacttt

SEQ ID NO: 2772 - DNA, 554 bp, Mus musculus; identical to SEQ ID NO: 2771
  misc_feature (347)..(347): n is a, c, g, or t
  misc_feature (382)..(382): n is a, c, g, or t
  misc_feature (451)..(451): n is a, c, g, or t

SEQ ID NO: 2773 - DNA, 552 bp, Mus musculus
  misc_feature (57)..(57): n is a, c, g, or t
  misc_feature (173)..(173): n is a, c, g, or t
  misc_feature (406)..(422): n is a, c, g, or t
ggagttagccctctttccctacacatcccctttttgatttccaagaggggattctcnctgttgttcctggatcgtggtatggacgcacatcaaggacatgtggactatactgctgtacatagggtctacaagcattcttcatggctcattgtagaaatgatagcatggaatgnaagcacctgtcagtgtgggcctcggtggacgaccacagcaccactggcacatctttgagggcttccttctctaagtaattgacagaactgttgtgctcataaaaatgaagtcataaaaataagtagtccttttttgctggtttaaaaaagaaaaattaaaggagaaaaggacagaataaaagtgctttttactttttatgatacacagaaattagggtggagagcttttacannnnnnnnnnnnnnnnngaggctgctgtctctgccaatcacaagtttgattggcaaccttctggtctgactggagccctctctaaactgttaatgaacttcacaagcctttctgaaatagtacagagtcagaactatgccggtttat

SEQ ID NO: 2774 - DNA, 552 bp, Mus musculus; identical to SEQ ID NO: 2773
  misc_feature (57)..(57): n is a, c, g, or t
  misc_feature (173)..(173): n is a, c, g, or t
  misc_feature (406)..(422): n is a, c, g, or t

SEQ ID NO: 2775 - DNA, 319 bp, Mus musculus
aaggtgaccgcagagctgcacaaaactgaagcagctttttgtgcctcccagtggctgcctcaggagcctatgcaataatggacaggtgattctccctcatttcattcttgggctgccatagcccctgctgtaatttatttctttagccatccttcccccgatactaagaggaaaaattattcctcatactgctttcaagctatcctaagccagtgtcactgtggaaaggagcgaacggatgctgcgtccacgagaacttgacagctccatcctcccctcacccgcacagcacggtagtgttaggcttggttcccttggg

SEQ ID NO: 2776 - DNA, 319 bp, Mus musculus; identical to SEQ ID NO: 2775

SEQ ID NO: 2777 - DNA, 238 bp, Mus musculus
  misc_feature (38)..(38): n is a, c, g, or t
  misc_feature (137)..(137): n is a, c, g, or t
  misc_feature (143)..(145): n is a, c, g, or t
  misc_feature (157)..(158): n is a, c, g, or t
  misc_feature (160)..(160): n is a, c, g, or t
  misc_feature (164)..(164): n is a, c, g, or t
tgtggaacttgtacggccatgattttggccaagggccntcagagtagcagcagtagtagtgactctccccagtatgtttacttatacttgtttggtagatactattatctttttgaccaacatgctgagggaaaaantaaaannnccatagaataanngnagangattttttttacagatttccttttaagacaggtggattgacaccttcctgcttaccactaggtatcaacacatg

SEQ ID NO: 2778 - DNA, 238 bp, Mus musculus; identical to SEQ ID NO: 2777
  misc_feature (38)..(38): n is a, c, g, or t
  misc_feature (137)..(137): n is a, c, g, or t
  misc_feature (143)..(145): n is a, c, g, or t
  misc_feature (157)..(158): n is a, c, g, or t
  misc_feature (160)..(160): n is a, c, g, or t
  misc_feature (164)..(164): n is a, c, g, or t

SEQ ID NO: 2779 - DNA, 213 bp, Mus musculus
  misc_feature (107)..(107): n is a, c, g, or t
  misc_feature (176)..(176): n is a, c, g, or t
  misc_feature (178)..(178): n is a, c, g, or t
ggctttgttggttggcctaagcttaaacattccactcgttctccctgcaaccctgactagaacgtctgtggtggtttctggcccagctgaaggaaaattgagatttntgcatttaagtattttaagtgggttttgatagattttaattctttccataaggtatttatttggggttntntggtgtgagtgacagagccacactgtagttacttt

SEQ ID NO: 2780 - DNA, 213 bp, Mus musculus; identical to SEQ ID NO: 2779
  misc_feature (107)..(107): n is a, c, g, or t
  misc_feature (176)..(176): n is a, c, g, or t
  misc_feature (178)..(178): n is a, c, g, or t

SEQ ID NO: 2781 - DNA, 109 bp, Mus musculus
taagagttgtataccctttgtctaaatatgcttgtctgttcacggaaaggacagaactggaaattttaagaaaggaaaaaaagtacactgaagtactttggataacttg

SEQ ID NO: 2782 - DNA, 109 bp, Mus musculus; identical to SEQ ID NO: 2781

SEQ ID NO: 2783 - DNA, 274 bp, Mus musculus
  misc_feature (54)..(54): n is a, c, g, or t
  misc_feature (66)..(83): n is a, c, g, or t
  misc_feature (93)..(93): n is a, c, g, or t
  misc_feature (107)..(107): n is a, c, g, or t
  misc_feature (189)..(189): n is a, c, g, or t
tggccccattccaagtttaaatgtacatgacatacactcaagttagtgtacctnatggatgaatannnnnnnnnnnnnnnnnntattttttanttttttcctttttntatgcagcccaaggtggcctcaaacaactcagaatcctccagctatagcctcatgggtgctggaattctaggcctgcatggnctctcctggcctagcttgctagttttatatgatgggaagtctgcagaatatacgtggtatttttgttctgtattggaaagctgcc

SEQ ID NO: 2784 - DNA, 274 bp, Mus musculus; identical to SEQ ID NO: 2783
  misc_feature (54)..(54): n is a, c, g, or t
  misc_feature (66)..(83): n is a, c, g, or t
  misc_feature (93)..(93): n is a, c, g, or t
  misc_feature (107)..(107): n is a, c, g, or t
  misc_feature (189)..(189): n is a, c, g, or t

SEQ ID NO: 2785 - DNA, 180 bp, Mus musculus
  misc_feature (42)..(56): n is a, c, g, or t
tgtatacagatttccgatcttaggttctggagacattcagannnnnnnnnnnnnnnagagtttgctttgttcggctactttggtatgggaaggaggggtagaacgtgaggttttgcagagcctagaagatggaattatgcagcttttccttgttctgcggtgttgctatgagcccccatt

SEQ ID NO: 2786 - DNA, 182 bp, Mus musculus
  misc_feature (42)..(56): n is a, c, g, or t
tgtatacagatttccgatcttaggttctggagacattcagannnnnnnnnnnnnnnagagtttgctttgttcggctactttggtatgggaaggaggggtagaacgtgaggttttgcagagcctagaagatggaattatgcagcttttccttgttctgcggtgttgctatgagcccccattgg

SEQ ID NO: 2787 - DNA, 182 bp, Mus musculus; identical to SEQ ID NO: 2786
  misc_feature (42)..(56): n is a, c, g, or t

SEQ ID NO: 2788 - DNA, 60 bp, Mus musculus
tcaactggatttccggctctgcgcggaagacatgaaaagatttgacagcagaaggcctac

SEQ ID NO: 2789 - DNA, 60 bp, Mus musculus; identical to SEQ ID NO: 2788

SEQ ID NO: 2790 - DNA, 60 bp, Mus musculus; identical to SEQ ID NO: 2788

SEQ ID NO: 2791 - DNA, 143 bp, Mus musculus; identical to SEQ ID NO: 119

SEQ ID NO: 2792 - DNA, 143 bp, Mus musculus; identical to SEQ ID NO: 119

SEQ ID NO: 2793 - DNA, 143 bp, Mus musculus; identical to SEQ ID NO: 119

SEQ ID NO: 2794 - DNA, 211 bp, Mus musculus
  misc_feature (84)..(113): n is a, c, g, or t
acacacaatggaaacatggtcgccaaagaggacgaggtgaaatagacaatcaagttccagatgaagaaggtgctgtgtttgccnnnnnnnnnnnnnnnnnnnnnnnnnnnnnntgttgagctattttacaacatttatttggctgtcaattttttggtgtccttgcttaagaaaaattggcaaaacgtgcgggctttgtacatctagagca

SEQ ID NO: 2795 - DNA, 211 bp, Mus musculus; identical to SEQ ID NO: 2794
  misc_feature (84)..(113): n is a, c, g, or t

SEQ ID NO: 2796 - DNA, 211 bp, Mus musculus; identical to SEQ ID NO: 2794
  misc_feature (84)..(113): n is a, c, g, or t

SEQ ID NO: 2797 - DNA, 134 bp, Mus musculus
tcttgtttcaccagggtggcttagtggatcattcctgcaggctcagtcctcacccgttcctgaatcatgctgaattgttaccatcactgcaaacctacctgcctgtgaggaattagtgtgcagcctaagggcta

SEQ ID NO: 2798 - DNA, 134 bp, Mus musculus; identical to SEQ ID NO: 2797

SEQ ID NO: 2799 - DNA, 134 bp, Mus musculus; identical to SEQ ID NO: 2797

SEQ ID NO: 2800 - DNA, 123 bp, Mus musculus
  misc_feature (33)..(48): n is a, c, g, or t
  misc_feature (70)..(85): n is a, c, g, or t
ttcttgtttgccaaggctttggccaatatctannnnnnnnnnnnnnnntgcaatgtagggggtggtgggnnnnnnnnnnnnnnnngagttgtgcttgctggtggtgcttctccatccactgcc

SEQ ID NO: 2801 - DNA, 123 bp, Mus musculus; identical to SEQ ID NO: 2800
  misc_feature (33)..(48): n is a, c, g, or t
  misc_feature (70)..(85): n is a, c, g, or t

SEQ ID NO: 2802 - DNA, 123 bp, Mus musculus; identical to SEQ ID NO: 2800
  misc_feature (33)..(48): n is a, c, g, or t
  misc_feature (70)..(85): n is a, c, g, or t

SEQ ID NO: 2803 - DNA, 227 bp, Mus musculus
  misc_feature (37)..(51): n is a, c, g, or t
aacgatcgctgtttcctttcaaccgggagtagagctnnnnnnnnnnnnnnntcccttccggtgcgtgcgatagccacggaggggtcgctcctatttggagtttcaaagttttccacgcaccccaccccctaagcctccggaagttgctgttttccctttccttttctggactcccctcgggtgcctttgctaacttggggttctggctgttttcctttcataactgg

SEQ ID NO: 2804 - DNA, 227 bp, Mus musculus; identical to SEQ ID NO: 2803
  misc_feature (37)..(51): n is a, c, g, or t

SEQ ID NO: 2805 - DNA, 227 bp, Mus musculus; identical to SEQ ID NO: 2803
  misc_feature (37)..(51): n is a, c, g, or t

SEQ ID NO: 2806 - DNA, 125 bp, Mus musculus
  misc_feature (38)..(38): n is a, c, g, or t
aaattcgattctttcgagctccccacccaaaagtggcnttaattactagattggttgggtggagacctagccaccaaggggaggatttggggagggtgatggttttgccagcgtccattccctgt

SEQ ID NO: 2807 - DNA, 125 bp, Mus musculus; identical to SEQ ID NO: 2806
  misc_feature (38)..(38): n is a, c, g, or t

SEQ ID NO: 2808 - DNA, 125 bp, Mus musculus; identical to SEQ ID NO: 2806
  misc_feature (38)..(38): n is a, c, g, or t

SEQ ID NO: 2809 - DNA, 138 bp, Mus musculus
  misc_feature (31)..(47): n is a, c, g, or t
tccgaggaagccccgactcttctttggaaannnnnnnnnnnnnnnnnaatccacaggatttcaaaaaatctaaattatagctttaagccgtttcctccccaggacattgagatacaaaagagcgttgctgcttcactt

SEQ ID NO: 2810 - DNA, 138 bp, Mus musculus; identical to SEQ ID NO: 2809
  misc_feature (31)..(47): n is a, c, g, or t

SEQ ID NO: 2811 - DNA, 138 bp, Mus musculus; identical to SEQ ID NO: 2809
  misc_feature (31)..(47): n is a, c, g, or t

SEQ ID NO: 2812 - DNA, 149 bp, Mus musculus
cggaataccacagatgaaaagtataaagaattgggtatttatttaaattataaagaagacagttgtgtccgcctttagtttttgttcacaattcaggagaacagcagtaccactagcccagcacggaattcattcactcaagaagtttc

SEQ ID NO: 2813 - DNA, 149 bp, Mus musculus; identical to SEQ ID NO: 2812

SEQ ID NO: 2814 - DNA, 149 bp, Mus musculus; identical to SEQ ID NO: 2812

SEQ ID NO: 2815 - DNA, 87 bp, Mus musculus
gttgatgccctgaggttggtcagcttcttagttgataagtattttttaagtttcagcatacacccagaactgtattcagaattattg

SEQ ID NO: 2816 - DNA, 87 bp, Mus musculus; identical to SEQ ID NO: 2815

SEQ ID NO: 2817 - DNA, 87 bp, Mus musculus; identical to SEQ ID NO: 2815

SEQ ID NO: 2818 - DNA, 145 bp, Mus musculus
  misc_feature (89)..(107): n is a, c, g, or t
ctaaccagagttgaactaaggctgctccttcaacactccaggcccctgcctacccacttgctattgaagagggtttttcaggttctttnnnnnnnnnnnnnnnnnnnccctcgtgtgcggtgttttctgtgaatgctaattctgc

SEQ ID NO: 2819 - DNA, 145 bp, Mus musculus; identical to SEQ ID NO: 2818
  misc_feature (89)..(107): n is a, c, g, or t

SEQ ID NO: 2820 - DNA, 145 bp, Mus musculus; identical to SEQ ID NO: 2818
  misc_feature (89)..(107): n is a, c, g, or t

SEQ ID NO: 2821 - DNA, 58 bp, Mus musculus
tttggagaagcctgagatgtggcccctgctgccttctcactagttgcagtctatgtaa

SEQ ID NO: 2822 - DNA, 58 bp, Mus musculus; identical to SEQ ID NO: 2821

SEQ ID NO: 2823 - DNA, 58 bp, Mus musculus; identical to SEQ ID NO: 2821

SEQ ID NO: 2824 - DNA, 47 bp, Mus musculus
cggctagtagccatggtgtgctttgccctgttcagtgccgtaatttt

SEQ ID NO: 2825 - DNA, 47 bp, Mus musculus; identical to SEQ ID NO: 2824

SEQ ID NO: 2826 - DNA, 47 bp, Mus musculus; identical to SEQ ID NO: 2824

SEQ ID NO: 2827 - DNA, 164 bp, Mus musculus
gaatgtgccatgaccctttccctattctggatggcacattccattgaagctggcttcattggtgttttttgttttgttggtgtgccacctggaagacccttcttttctggacaagaggcacggaagagcatgttttcctttgagaacaggctgacagcagcaac

SEQ ID NO: 2828 - DNA, 164 bp, Mus musculus; identical to SEQ ID NO: 2827

SEQ ID NO: 2829 - DNA, 164 bp, Mus musculus; identical to SEQ ID NO: 2827

SEQ ID NO: 2830 - DNA, 192 bp, Mus musculus
ccgataaattcagttccatggcccaaacgtttgaacccaaggggtgggatgaaaatgttttgtttcgtaggtctgccccctgaccttgggcctcttttttttttcttaagttttgctttctttccttcatttgtgaaatgagttaataacacttgacgggtcaaccactgtcttgagaactgttagatcctg

SEQ ID NO: 2831 - DNA, 192 bp, Mus musculus; identical to SEQ ID NO: 2830

SEQ ID NO: 2832 - DNA, 192 bp, Mus musculus; identical to SEQ ID NO: 2830

SEQ ID NO: 2833 - DNA, 195 bp, Mus musculus
attgaatccctaatgcaggatggtgctaaacactacgacggccgcattgaatttgatgagtttctgaagatgatggagggcgttcagtaaggagaccgtttttctttttgtccatccagattgcaggtcccctgggtctgggtagctccacctttgctttccctgcctcacacgggaaaggctgctcctttgggt

SEQ ID NO: 2834 - DNA, 195 bp, Mus musculus; identical to SEQ ID NO: 2833

SEQ ID NO: 2835 - DNA, 195 bp, Mus musculus; identical to SEQ ID NO: 2833

SEQ ID NO: 2836 - DNA, 150 bp, Mus musculus
ttcaaggtttgctgcccttgtgttttgagataaattccccttccctagcagttgccactccatttagttacctgttggcaaggggtttgctggtgatagattagcttcctgcttcagttgcagccctgggaatacccagtgctgtttcct

SEQ ID NO: 2837 - DNA, 150 bp, Mus musculus; identical to SEQ ID NO: 2836

SEQ ID NO: 2838 - DNA, 150 bp, Mus musculus; identical to SEQ ID NO: 2836

SEQ ID NO: 2839 - DNA, 174 bp, Mus musculus
  misc_feature (123)..(137): n is a, c, g, or t
ctagattcacccatcgaagtttcgccagaattcccgttttccccgcatctactccaacccccaacattttatccacttatacgggttaaacatttgcctccagtgcttcccgcagtacgcgannnnnnnnnnnnnnnttaagttggactaagcgaccttgaaccgattccacta

SEQ ID NO: 2840 - DNA, 174 bp, Mus musculus; identical to SEQ ID NO: 2839
  misc_feature (123)..(137): n is a, c, g, or t

SEQ ID NO: 2841 - DNA, 174 bp, Mus musculus; identical to SEQ ID NO: 2839
  misc_feature (123)..(137): n is a, c, g, or t

SEQ ID NO: 2842 - DNA, 50 bp, Mus musculus
ccttacaagggcttccacgagaacgtctcacctgctggaaacttatgggg

SEQ ID NO: 2843 - DNA, 50 bp, Mus musculus; identical to SEQ ID NO: 2842

SEQ ID NO: 2844 - DNA, 50 bp, Mus musculus; identical to SEQ ID NO: 2842

SEQ ID NO: 2845 - DNA, 74 bp, Mus musculus
tcgatgatgcgcctgctggtccccatggcctgtgccatggagcggcataggtgatctgtcctggagagttgaaa

SEQ ID NO: 2846 - DNA, 74 bp, Mus musculus; identical to SEQ ID NO: 2845

SEQ ID NO: 2847 - DNA, 74 bp, Mus musculus; identical to SEQ ID NO: 2845

SEQ ID NO: 2848 - DNA, 83 bp, Mus musculus
cgccccaggtatctatgggcgagtatatttttgagcccctcaatttcaagcacgactaggagccctctgtaccttccaagggg

SEQ ID NO: 2849 - DNA, 83 bp, Mus musculus; identical to SEQ ID NO: 2848

SEQ ID NO: 2850 - DNA, 83 bp, Mus musculus; identical to SEQ ID NO: 2848

SEQ ID NO: 2851 - DNA, 69 bp, Mus musculus
catcccgggcagcttctaggtgggctggggtgcgtgctcaggtgctatgtcccaagagccctactgggg

SEQ ID NO: 2852 - DNA, 69 bp, Mus musculus; identical to SEQ ID NO: 2851

SEQ ID NO: 2853 - DNA, 69 bp, Mus musculus; identical to SEQ ID NO: 2851

SEQ ID NO: 2854 - DNA, 423 bp, Mus musculus
  misc_feature (27)..(27): n is a, c, g, or t
  misc_feature (47)..(47): n is a, c, g, or t
  misc_feature (49)..(71): n is a, c, g, or t
  misc_feature (110)..(126): n is a, c, g, or t
  misc_feature (232)..(260): n is a, c, g, or t
  misc_feature (333)..(341): n is a, c, g, or t
  misc_feature (343)..(343): n is a, c, g, or t
  misc_feature (370)..(370): n is a, c, g, or t
  misc_feature (376)..(376): n is a, c, g, or t
  misc_feature (380)..(380): n is a, c, g, or t
aacaccaaagctaattctgcctgtggntggcaacatgaaggacgaantnnnnnnnnnnnnnnnnnnnnnnntcgtgggagttctgttgcaagcctacttctccctacagnnnnnnnnnnnnnnnnnggctttccacgtgtcgccgccgctcacctctggccctcccgagttcgagcgcgtcttccgagcccaggtaaactgcagcgagtactttccgctgttcctcgccacnnnnnnnnnnnnnnnnnnnnnnnnnnnnnaaggagccgcagccctgtgcggactgttctacctgttcgcgcgcctccgctatttccagggatacgcgcgctnnnnnnnnntncaggctgactcccctatacgcgagcgngcgcgnactnctggctgctggtggcgatggctgcactgggcttgctagtccac

SEQ ID NO: 2855 - DNA, 424 bp, Mus musculus
  misc_feature (27)..(27): n is a, c, g, or t
  misc_feature (47)..(47): n is a, c, g, or t
  misc_feature (49)..(71): n is a, c, g, or t
  misc_feature (110)..(126): n is a, c, g, or t
  misc_feature (232)..(260): n is a, c, g, or t
  misc_feature (333)..(341): n is a, c, g, or t
  misc_feature (343)..(343): n is a, c, g, or t
  misc_feature (370)..(370): n is a, c, g, or t
  misc_feature (376)..(376): n is a, c, g, or t
  misc_feature (380)..(380): n is a, c, g, or t
aacaccaaagctaattctgcctgtggntggcaacatgaaggacgaantnnnnnnnnnnnnnnnnnnnnnnntcgtgggagttctgttgcaagcctacttctccctacagnnnnnnnnnnnnnnnnnggctttccacgtgtcgccgccgctcacctctggccctcccgagttcgagcgcgtcttccgagcccaggtaaactgcagcgagtactttccgctgttcctcgccacnnnnnnnnnnnnnnnnnnnnnnnnnnnnnaaggagccgcagccctgtgcggactgttctacctgttcgcgcgcctccgctatttccagggatacgcgcgctnnnnnnnnntncaggctgactcccctatacgcgagcgngcgcgnactnctggctgctggtggcgatggctgcactgggcttgctagtccact

SEQ ID NO: 2856 - DNA, 238 bp, Mus musculus
  misc_feature (47)..(47): n is a, c, g, or t
  misc_feature (51)..(51): n is a, c, g, or t
  misc_feature (54)..(54): n is a, c, g, or t
  misc_feature (64)..(64): n is a, c, g, or t
  misc_feature (73)..(73): n is a, c, g, or t
  misc_feature (88)..(88): n is a, c, g, or t
  misc_feature (90)..(90): n is a, c, g, or t
  misc_feature (93)..(93): n is a, c, g, or t
  misc_feature (109)..(109): n is a, c, g, or t
  misc_feature (153)..(153): n is a, c, g, or t
  misc_feature (203)..(205): n is a, c, g, or t
  misc_feature (207)..(208): n is a, c, g, or t
gaagggaacgtcatcctttggtaagcgtcgcaacaagacgcacacgntgtnccnccgctgtggntccaaggcntaccaccttcagaantnganttgtggcaagtgtggntaccctgccaagcgcaagaggaagtataactggagtgccaaggntaagagacgaaacactaccgggactggtcggatgaggcacctaaagattnnntnnaccgcagattcagacatggattccgtgagg

SEQ ID NO: 2857 - DNA, 238 bp, Mus musculus; identical to SEQ ID NO: 2856
  misc_feature (47)..(47): n is a, c, g, or t
  misc_feature (51)..(51): n is a, c, g, or t
  misc_feature (54)..(54): n is a, c, g, or t
  misc_feature (64)..(64): n is a, c, g, or t
  misc_feature (73)..(73): n is a, c, g, or t
  misc_feature (88)..(88): n is a, c, g, or t
  misc_feature (90)..(90): n is a, c, g, or t
  misc_feature (93)..(93): n is a, c, g, or t
  misc_feature (109)..(109): n is a, c, g, or t
  misc_feature (153)..(153): n is a, c, g, or t
  misc_feature (203)..(205): n is a, c, g, or t
  misc_feature (207)..(208): n is a, c, g, or t

SEQ ID NO: 2858 - DNA, 391 bp, Mus musculus
  misc_feature (222)..(243): n is a, c, g, or t
  misc_feature (287)..(301): n is a, c, g, or t
  misc_feature (349)..(349): n is a, c, g, or t
  misc_feature (352)..(352): n is a, c, g, or t
gctacccttggactacttccagtgaatgcacccgctgctcttccgaatccagctgctctgcccacttggaggggacaaatgtagaaggtgtttcctcccagcagagtgctctccctcaccaggagggtgagcccagggcaggattgagcccagttcacatacccccttcctgccgctatcgtcgcctaactggtgactcgggtattgagctctgcccttgtnnnnnnnnnnnnnnnnnnnnnncactcaaggaagcgagggctagtgcctcccagccagatctggannnnnnnnnnnnnnntgcactgcccccagattctgtgtcccaagttcctcccatggggctggnttntagttgtggggacatcccataagtagtttcaagagggaa

SEQ ID NO: 2859 - DNA, 391 bp, Mus musculus; identical to SEQ ID NO: 2858
  misc_feature (222)..(243): n is a, c, g, or t
  misc_feature (287)..(301): n is a, c, g, or t
  misc_feature (349)..(349): n is a, c, g, or t
  misc_feature (352)..(352): n is a, c, g, or t

SEQ ID NO: 2860 - DNA, 283 bp, Mus musculus
  misc_feature (34)..(78): n is a, c, g, or t
  misc_feature (176)..(176): n is a, c, g, or t
  misc_feature (196)..(196): n is a, c, g, or t
  misc_feature (257)..(257): n is a, c, g, or t
tgagaaacggccacgcagttgtgcttcctgtacnnnnnnnnnnnnnnnnnnnnnnnnnnnnnnnnnnnnnnnnnnnnntcctgtcatgtggtagtgctggtgcggccttaccataccactcgctagagtatctgtcatatcatggaagtcctacttcattaaaaccattaagtacncttggctttccacagggacnttgtagagaagcagatacctgctttagctggctgtacaattgagggagctgttagctaccnctaaggctcccattgggatcctgtgc

SEQ ID NO: 2861 - DNA, 283 bp, Mus musculus; identical to SEQ ID NO: 2860
  misc_feature (34)..(78): n is a, c, g, or t
  misc_feature (176)..(176): n is a, c, g, or t
  misc_feature (196)..(196): n is a, c, g, or t
  misc_feature (257)..(257): n is a, c, g, or t

SEQ ID NO: 2862 - DNA, 265 bp, Mus musculus
  misc_feature (135)..(149): n is a, c, g, or t
  misc_feature (240)..(240): n is a, c, g, or t
ccttaagttatacacacgtacgtgtctgccagcttctgggcctttgctgtgttttcctctgcttcaaagagccaaccaaggaggccgtgggctgagagcctctcggccagctattccctaacctgctgcctacannnnnnnnnnnnnnngcatccagtcccggctgcctgttgggaaccctgcttctgaaggttcccctctccaccccctccacccagaggtcgggagaaccttctgganccttgcattgactgttaaggagcta

SEQ ID NO: 2863 - DNA, 265 bp, Mus musculus; identical to SEQ ID NO: 2862
  misc_feature (135)..(149): n is a, c, g, or t
  misc_feature (240)..(240): n is a, c, g, or t

SEQ ID NO: 2864 - DNA, 318 bp, Mus musculus
  misc_feature (194)..(235): n is a, c, g, or t
cttctactctggaccgcttctgtctcctcctgccgtctgtgactggaacactgcgcatgcgcacagtgcacgcagatggtgtcagagcctgggagcctgctgccgcgcaaacagcatcttagccgttgtccatggtgactggacacgaaaagcaactgcctgctgaccaaagcctcattctcaactcaccaggnnnnnnnnnnnnnnnnnnnnnnnnnnnnnnnnnnnnnnnnnngagaaactgcgatagcccacagacatggcttcattttttttgaattttctctttccaaagccaaacagccttgccctgacagg

SEQ ID NO: 2865 - DNA, 318 bp, Mus musculus; identical to SEQ ID NO: 2864
  misc_feature (194)..(235): n is a, c, g, or t

SEQ ID NO: 2866 - DNA, 375 bp, Mus musculus
gtatttatccttgatcatagtttgcttatttatgtttaactcttcggacttcagagcactttatgtagttgaataaaccctagaggttgaggtgactaaaaggttagcctctcataacccagccatggaagttttgtttactaggagcctgacttcccagctcacaaagggtgaaatgaaagctgaagtacagacaggatcttagtaggtattttaggtccagggccatgaagacttggagagcgcagtggctgggcaaggggctgctttggagggaagaagcatgtggtctgagtgctgactagatgaatagttgaggcacatccttcagagaagagggaggggctgcttggaaagatggctctcagcaaaatc

SEQ ID NO: 2867 - DNA, 375 bp, Mus musculus; identical to SEQ ID NO: 2866

SEQ ID NO: 2868 - DNA, 537 bp, Mus musculus
  misc_feature (178)..(229): n is a, c, g, or t
  misc_feature (269)..(341): n is a, c, g, or t
  misc_feature (344)..(344): n is a, c, g, or t
  misc_feature (347)..(347): n is a, c, g, or t
  misc_feature (363)..(363): n is a, c, g, or t
  misc_feature (367)..(409): n is a, c, g, or t
  misc_feature (453)..(453): n is a, c, g, or t
  misc_feature (477)..(477): n is a, c, g, or t
  misc_feature (495)..(495): n is a, c, g, or t
  misc_feature (497)..(497): n is a, c, g, or t
ctatgtagccctggatttcgagaatgagatggccacagcagcttcatcttcttccctggagaaaagctacgagttgcctgatgggcaggtcatcactattggcaacgagcgcttccgctgcccggagaccctcttccagccttccttcattggcatggagtcagctggaattcatgannnnnnnnnnnnnnnnnnnnnnnnnnnnnnnnnnnnnnnnnnnnnnnnnnnntatgctaacaatgtcctctctgggggcactaccatgtacnnnnnnnnnnnnnnnnnnnnnnnnnnnnnnnnnnnnnnnnnnnnnnnnnnnnnnnnnnnnnnnnnnnnnnnnncgntcntcctgagcggaagtantcannnnnnnnnnnnnnnnnnnnnnnnnnnnnnnnnnnnnnnnnnnagcaaatgtggatcagcaagccagagtatgatgaggcagggccntccattgtccacaggaaatgcttntaaagtcagagggccttntntggggatccccacaagactgctgtcaccagccacagatca

SEQ ID NO: 2869 - DNA, 537 bp, Mus musculus; identical to SEQ ID NO: 2868
  misc_feature (178)..(229): n is a, c, g, or t
  misc_feature (269)..(341): n is a, c, g, or t
  misc_feature (344)..(344): n is a, c, g, or t
  misc_feature (347)..(347): n is a, c, g, or t
  misc_feature (363)..(363): n is a, c, g, or t
  misc_feature (367)..(409): n is a, c, g, or t
  misc_feature (453)..(453): n is a, c, g, or t
  misc_feature (477)..(477): n is a, c, g, or t
  misc_feature (495)..(495): n is a, c, g, or t
  misc_feature (497)..(497): n is a, c, g, or t

SEQ ID NO: 2870 - DNA, 575 bp, Mus musculus
  misc_feature (47)..(89): n is a, c, g, or t
  misc_feature (263)..(283): n is a, c, g, or t
  misc_feature (390)..(390): n is a, c, g, or t
  misc_feature (397)..(397): n is a, c, g, or t
  misc_feature (417)..(417): n is a, c, g, or t
  misc_feature (487)..(502): n is a, c, g, or t
cttgatgggtccatgtcttattcggaaagagaaaaaaatatatacannnnnnnnnnnnnnnnnnnnnnnnnnnnnnnnnnnnnnnnnnnacgagctggtggtttaggcataaacttgactgcagcagatacagtgatcatttatgacagtgattggaatcctcagtctgatctccaggctcaagatagatgtcatagaattggtcagacaaagccagttgttgtgtatcgtcttgtaacagcaaatactattgaccagaaaannnnnnnnnnnnnnnnnnnnnaaagaaagttggagaagttgataatccataaaaatcatttcaaaggtggtcagtctgggttaagtcaatctaagaatttcttagatgcaaaggaattaatggagttnattaaantctagagattatgaaagggnaagtaaaaggatccagagagaaggtcattagtgacgaagatctagaattactgttggatcgaagtgatcnnnnnnnnnnnnnnnnggcttcaagaccaattaaagggaagacagggatattcaaaatactagaaaattctgaagattccagtgctgaa

SEQ ID NO: 2871 - DNA, 575 bp, Mus musculus; identical to SEQ ID NO: 2870
  misc_feature (47)..(89): n is a, c, g, or t
  misc_feature (263)..(283): n is a, c, g, or t
  misc_feature (390)..(390): n is a, c, g, or t
  misc_feature (397)..(397): n is a, c, g, or t
  misc_feature (417)..(417): n is a, c, g, or t
  misc_feature (487)..(502): n is a, c, g, or t

SEQ ID NO: 2872 - DNA, 401 bp, Mus musculus
  misc_feature (189)..(189): n is a, c, g, or t
cattgtcctgattcagtgggtttttaaaaatctcccctctgttttgccaacctaattttcaagtagcaatttatcttatgaccttgacaaagttgtgtgactttacatttaagataataattagaacagctccctttagagatcacagttgctactgcctgtctcttaaagactgctcaagtctgtttntgattcatcatttagaattttgtttcaaatgtttctttttggggtctgttaccttctggggtttcagttcctcagaaataactttccataatgggaagtacagagcagtgaacagaaatgagatttttttgtgtgtacttcaaacagcatagtgtttatcttacaaaagagaaggtactcctgagagcaattcggaatcatgctgacaagga

SEQ ID NO: 2873 - DNA, 401 bp, Mus musculus; identical to SEQ ID NO: 2872
  misc_feature (189)..(189): n is a, c, g, or t

SEQ ID NO: 2874 - DNA, 358 bp, Mus musculus
  misc_feature (51)..(51): n is a, c, g, or t
  misc_feature (54)..(54): n is a, c, g, or t
  misc_feature (280)..(280): n is a, c, g, or t
  misc_feature (283)..(304): n is a, c, g, or t
gttggcatgagcacagtcccagaagttatcgtcgcaaggcactgtgggctncgngtctttggtttctcactcattacgaacaaggttgtcatggattatgagaacttggagaaggccaatcacatggaagttctggatgccgggaaagcagctgcacagacattggaaaggtttgtctccattcttatggagagcattccactcccggatcgtggcagctgacctgcaatggagtgctccgctgctcccctggtggggtccaagtagctctctactctgnttnnnnnnnnnnnnnnnnnnnnnnctgttcttagatcctagcagaaaggaaagaggagcttacccttcactttccaga

SEQ ID NO: 2875 - DNA, 358 bp, Mus musculus; identical to SEQ ID NO: 2874
  misc_feature (51)..(51): n is a, c, g, or t
  misc_feature (54)..(54): n is a, c, g, or t
  misc_feature (280)..(280): n is a, c, g, or t
  misc_feature (283)..(304): n is a, c, g, or t

SEQ ID NO: 2876 - DNA, 421 bp, Mus musculus
  misc_feature (34)..(34): n is a, c, g, or t
  misc_feature (132)..(132): n is a, c, g, or t
  misc_feature (240)..(240): n is a, c, g, or t
  misc_feature (242)..(242): n is a, c, g, or t
  misc_feature (251)..(252): n is a, c, g, or t
  misc_feature (257)..(257): n is a, c, g, or t
  misc_feature (276)..(276): n is a, c, g, or t
  misc_feature (281)..(281): n is a, c, g, or t
  misc_feature (295)..(295): n is a, c, g, or t
  misc_feature (328)..(329): n is a, c, g, or t
tggcacagcctgtcatccctttgtctatggtggntgcggagggaatgccaatcgttttggaacccgtgaggcgtgtgagcgccgctgcccaccccaaggggtccacagccagaaaacaggtgctgcctaggnctgaggcccggatgatgcgcttggtggccagcagtccctggaggtggcagggtctcagccgggtcctgctgtgctccatttggtgctagagttgtgtgtgcacgtgancntgtatattnngtgtncacatgagcatgtccactntttcngtgacttggtcctntgggtctaagtggggggggacccccatggacanntccccattgtggcgcccgctttcctggcagatgactcactgttgggggtggctgtgggcagtgaatggatgtgactggtgtccaacctgccc

SEQ ID NO: 2877 - DNA, 421 bp, Mus musculus; identical to SEQ ID NO: 2876
  misc_feature (34)..(34): n is a, c, g, or t
  misc_feature (132)..(132): n is a, c, g, or t
  misc_feature (240)..(240): n is a, c, g, or t
  misc_feature (242)..(242): n is a, c, g, or t
  misc_feature (251)..(252): n is a, c, g, or t
  misc_feature (257)..(257): n is a, c, g, or t
  misc_feature (276)..(276): n is a, c, g, or t
  misc_feature (281)..(281): n is a, c, g, or t
  misc_feature (295)..(295): n is a, c, g, or t
  misc_feature (328)..(329): n is a, c, g, or t

SEQ ID NO: 2878 - DNA, 610 bp, Mus musculus
  misc_feature (26)..(26): n is a, c, g, or t
  misc_feature (28)..(28): n is a, c, g, or t
  misc_feature (99)..(99): n is a, c, g, or t
  misc_feature (119)..(119): n is a, c, g, or t
  misc_feature (354)..(355): n is a, c, g, or t
  misc_feature (358)..(358): n is a, c, g, or t
  misc_feature (360)..(361): n is a, c, g, or t
  misc_feature (363)..(364): n is a, c, g, or t
  misc_feature (366)..(367): n is a, c, g, or t
  misc_feature (369)..(370): n is a, c, g, or t
  misc_feature (373)..(376): n is a, c, g, or t
  misc_feature (378)..(389): n is a, c, g, or t
  misc_feature (395)..(395): n is a, c, g, or t
  misc_feature (449)..(449): n is a, c, g, or t
  misc_feature (536)..(536): n is a, c, g, or t
  misc_feature (551)..(551): n is a, c, g, or t
  misc_feature (565)..(565): n is a, c, g, or t
  misc_feature (574)..(575): n is a, c, g, or t
atgaatagcgtcattcagtctttgtncnacactcgggaacttcgtgacttctttcacgaccgatcctttgaagctgagattaactacaataacccattngggactggtgggcgcctcgncattggctttgctgtgctgctccgggccctatggaagggtactcaccaagcctttcagccctccaagctaaaggccattgtggcaagcaaggccagccagttcacaggctatgcacagcatgatgctcaagagttcatggctttcttgttggatgggctacatgaagacctcaatcgaatccaaaacaaaccctacacagagactgtggactcggacgggcggcccgatgaggtnngtngnngnngnngnntgnnnncnnnnnnnnnnnngccctnagttctccttagttctcactgtcttccttcaggtggtagccgaggaagcatggnagcggcacaagatgagaaatgattcattcattgtggacctgtttcagggccagtacaagtcaaagctggtgtgccctgtgtgtgccnaggtacggtgggttncccgagagagatgnccccttgtnngttgggctggtgagatggccagtgggtaagacccc

SEQ ID NO: 2879 - DNA, 610 bp, Mus musculus; identical to SEQ ID NO: 2878
  misc_feature (26)..(26): n is a, c, g, or t
  misc_feature (28)..(28): n is a, c, g, or t
  misc_feature (99)..(99): n is a, c, g, or t
  misc_feature (119)..(119): n is a, c, g, or t
  misc_feature (354)..(355): n is a, c, g, or t
  misc_feature (358)..(358): n is a, c, g, or t
  misc_feature (360)..(361): n is a, c, g, or t
  misc_feature (363)..(364): n is a, c, g, or t
  misc_feature (366)..(367): n is a, c, g, or t
  misc_feature (369)..(370): n is a, c, g, or t
  misc_feature (373)..(376): n is a, c, g, or t
  misc_feature (378)..(389): n is a, c, g, or t
  misc_feature (395)..(395): n is a, c, g, or t
  misc_feature (449)..(449): n is a, c, g, or t
  misc_feature (536)..(536): n is a, c, g, or t
  misc_feature (551)..(551): n is a, c, g, or t
  misc_feature (565)..(565): n is a, c, g, or t
  misc_feature (574)..(575): n is a, c, g, or t

SEQ ID NO: 2880 - DNA, 157 bp, Mus musculus
  misc_feature (29)..(43): n is a, c, g, or t
tatcctaaaatcgtgtctagtgcgctcgnnnnnnnnnnnnnnnaaatggggactcttttcatgtgtgtcatttttaaagtgttgaaagcttagcctttgaataccttctgcattggtaaaaaatccatggaaccactcatggcacatcttaggagat

SEQ ID NO: 2881 - DNA, 157 bp, Mus musculus; identical to SEQ ID NO: 2880
  misc_feature (29)..(43): n is a, c, g, or t

SEQ ID NO: 2882 - DNA, 341 bp, Mus musculus
  misc_feature (32)..(47): n is a, c, g, or t
  misc_feature (79)..(93): n is a, c, g, or t
ttttaagacctttccaaaggctgcttgcatgnnnnnnnnnnnnnnnnccaaagcttcctgtatgtgcatccaggcctgnnnnnnnnnnnnnnncggatgtgtgttcatctgttgagagcatgaggagcaaaaacccgtttcccaaagcaagaggaggctatttcagttttagggatttttttttttttttttttttgcactgagttgattcatttctgcacagggagtaaagattattaagattacatatgagaaaagtaaacctgcaacatgaaaaattatttggaccaatatattgataaatctaaattgttaggagaactcttactgatttattgtca

SEQ ID NO: 2883 - DNA, 341 bp, Mus musculus; identical to SEQ ID NO: 2882
  misc_feature (32)..(47): n is a, c, g, or t
  misc_feature (79)..(93): n is a, c, g, or t

SEQ ID NO: 2884 - DNA, 295 bp, Mus musculus
  misc_feature (27)..(41): n is a, c, g, or t
  misc_feature (117)..(118): n is a, c, g, or t
ccttgcatgttaaccgtcgttcaaaannnnnnnnnnnnnnnatactgtgtatagtgaaagagtgtgtagtcttccagaactacattatgatctttgatcattgatctttcccccccnntttatacacagtagtgtttaattagtatagtagcacacgagtaaggcacctgtgagtacaatgtaaagaaagggatttatgaaattattctcattttaagtttaaatgccaacctatcgcctccaatatgtaattcttaatggagatgttaaaactgtactctgaatcatgattgga

SEQ ID NO: 2885 - DNA, 295 bp, Mus musculus; identical to SEQ ID NO: 2884
  misc_feature (27)..(41): n is a, c, g, or t
  misc_feature (117)..(118): n is a, c, g, or t

SEQ ID NO: 2886 - DNA, 399 bp, Mus musculus
  misc_feature (144)..(144): n is a, c, g, or t
  misc_feature (161)..(175): n is a, c, g, or t
  misc_feature (351)..(352): n is a, c, g, or t
  misc_feature (357)..(357): n is a, c, g, or t
aatggaagctgtccaccaagaaagcctgctcagctccagaggtatacaagtcagctgagtatttgtagggcaagtggccttggagaaggtagggcactccggctgctgcagggacatgcaattgggaacttggctccttgagcntatatggacagtggtgnnnnnnnnnnnnnnnacatggagtcctggccacctgggggagcctgctttggtactacagaactttgtggacaaactgtgtctaaggtgtcctgtgtggatggctttccaagcgcggtgctccacctttggcagcctcccacgtgctgaatctgtcttccaggagctgcccctatggggtgggccgcggcnnaaccnctatctgtagccacatccttgtctgtaagaaagccaggaata

SEQ ID NO: 2887 - DNA, 399 bp, Mus musculus; identical to SEQ ID NO: 2886
  misc_feature (144)..(144): n is a, c, g, or t
  misc_feature (161)..(175): n is a, c, g, or t
  misc_feature (351)..(352): n is a, c, g, or t
  misc_feature (357)..(357): n is a, c, g, or t

SEQ ID NO: 2888 - DNA, 373 bp, Mus musculus
  misc_feature (106)..(106): n is a, c, g, or t
  misc_feature (172)..(246): n is a, c, g, or t
  misc_feature (248)..(250): n is a, c, g, or t
  misc_feature (341)..(341): n is a, c, g, or t
gcttggcatactcactgatgttctggtcccatacctaataggacaagtggctgctggtgctcaggcattgcagctctttgagtcccacgcaggacatcttggcacngagctcttcagcaagtttgcactgccctacattcgtgatgtggccaagcgagtgaaggctgggttnnnnnnnnnnnnnnnnnnnnnnnnnnnnnnnnnnnnnnnnnnnnnnnnnnnnnnnnnnnnnnnnnnnnnnnnnnncnnnccaggctggctatgaggtagttggacttgactggacagtggctccaaagaaagcccgggaacgtgtcgggaaggcagtgaccctgcagggnaacctggatccctgtgccttgtatgcatctga

SEQ ID NO: 2889 - DNA, 373 bp, Mus musculus; identical to SEQ ID NO: 2888
  misc_feature (106)..(106): n is a, c, g, or t
  misc_feature (172)..(246): n is a, c, g, or t
  misc_feature (248)..(250): n is a, c, g, or t
  misc_feature (341)..(341): n is a, c, g, or t

SEQ ID NO: 2890 - DNA, 583 bp, Mus musculus
  misc_feature (32)..(48): n is a, c, g, or t
  misc_feature (253)..(378): n is a, c, g, or t
  misc_feature (398)..(398): n is a, c, g, or t
  misc_feature (441)..(441): n is a, c, g, or t
  misc_feature (471)..(471): n is a, c, g, or t
  misc_feature (473)..(473): n is a, c, g, or t
  misc_feature (522)..(522): n is a, c, g, or t
cgatgaagtttctctcggaagtatgaacgatnnnnnnnnnnnnnnnnntgaagatggaggaacgttcatggatgtgtcagatgatgaaagtgaagatgctccagaatttgctgacgccaaccccaaagccaatactaagaaaagcaagagaaagagtgaagatgattttgactttgctgggtcatttcaaggacaaaagaaaaagaagaaaagtttcaatgactccagcctgtttgtctctgctgaggagttnnnnnnnnnnnnnnnnnnnnnnnnnnnnnnnnnnnnnnnnnnnnnnnnnnnnnnnnnnnnnnnnnnnnnnnnnnnnnnnnnnnnnnnnnnnnnnnnnnnnnnnnnnnnnnnnnnnnnnnnnnnnnncaacagagatgtgaaaagtntcatcaagaaaaagaaaaatttcaggaagaagatgaaagcccntcagaaacccaaacggcagaggaagtgacntnttcagggtgacaataaattaagattatacttacccttagtttttgctantcaaccatttttcctcatctttctctctaactccatacattccagactgttcaatggattt

SEQ ID NO: 2891 - DNA, 583 bp, Mus musculus; identical to SEQ ID NO: 2890
  misc_feature (32)..(48): n is a, c, g, or t
  misc_feature (253)..(378): n is a, c, g, or t
  misc_feature (398)..(398): n is a, c, g, or t
  misc_feature (441)..(441): n is a, c, g, or t
  misc_feature (471)..(471): n is a, c, g, or t
  misc_feature (473)..(473): n is a, c, g, or t
  misc_feature (522)..(522): n is a, c, g, or t

SEQ ID NO: 2892 - DNA, 454 bp, Mus musculus
  misc_feature (145)..(166): n is a, c, g, or t
  misc_feature (309)..(309): n is a, c, g, or t
  misc_feature (312)..(312): n is a, c, g, or t
  misc_feature (330)..(330): n is a, c, g, or t
  misc_feature (341)..(341): n is a, c, g, or t
  misc_feature (343)..(343): n is a, c, g, or t
  misc_feature (414)..(414): n is a, c, g, or t
ttcttcaggacagagcagtcctgatgatacagtaattgatggcagacagttctgtctccttcccagttgttaggctgcccccctgagcctcaccttgttcaccttggttttccgatgatgagcttccctagacagatcatgctcnnnnnnnnnnnnnnnnnnnnnnccgtgatctgtcagctgtgctctcttagcctccagcctgagctctcaagaggtggtagagctaagctctggaggtggagtcttaggaagacccaggagtgactgagcaggacagtaaagggattctcctcagaacccattgantcntccaccccacagttgtgnttggaagcctntngactgtgcttaaggttaggcatttaggaagcacactgctttttaaacgaccacagaaagaaaggacaattntaagaagtaaaaacttatttggaaggcagagacagacggc

SEQ ID NO: 2893 - DNA, 454 bp, Mus musculus; identical to SEQ ID NO: 2892
  misc_feature (145)..(166): n is a, c, g, or t
  misc_feature (309)..(309): n is a, c, g, or t
  misc_feature (312)..(312): n is a, c, g, or t
  misc_feature (330)..(330): n is a, c, g, or t
  misc_feature (341)..(341): n is a, c, g, or t
  misc_feature (343)..(343): n is a, c, g, or t
  misc_feature (414)..(414): n is a, c, g, or t

SEQ ID NO: 2894 - DNA, 326 bp, Mus musculus
  misc_feature (132)..(157): n is a, c, g, or t
tttacctcagcctgggtgctggtcctttcttccagcccctttcttcccctccaaatgtgcctatttctagagctcctccctcctaactcccaaatttttgggagttatcattaaaggaaaggaaaaaaaaannnnnnnnnnnnnnnnnnnnnnnnnngatctccagggagctggggattagtgccaggcagctctttgccagccatgcccacttccccatgggcacagaacaagccaaagccttcgttgtatgttgacgatgcacttttatgaatgtagtttctatcgctgtttttagccttttcacatcatgtaatgtgaggcct

SEQ ID NO: 2895 - DNA, 326 bp, Mus musculus; identical to SEQ ID NO: 2894
  misc_feature (132)..(157): n is a, c, g, or t

SEQ ID NO: 2896 - DNA, 119 bp, Mus musculus
cacatcatgtaatgtgaggccttgtacttgttaatttatatctcagatccatatttgatggttttatatatatatatcaattctagactgttaccggtgatggactcctgaagagagaa

SEQ ID NO: 2897 - DNA, 119 bp, Mus musculus; identical to SEQ ID NO: 2896

SEQ ID NO: 2898 - DNA, 501 bp, Mus musculus
  misc_feature (77)..(77): n is a, c, g, or t
  misc_feature (83)..(83): n is a, c, g, or t
  misc_feature (216)..(216): n is a, c, g, or t
  misc_feature (286)..(286): n is a, c, g, or t
  misc_feature (300)..(300): n is a, c, g, or t
  misc_feature (303)..(303): n is a, c, g, or t
  misc_feature (348)..(348): n is a, c, g, or t
  misc_feature (352)..(353): n is a, c, g, or t
  misc_feature (356)..(356): n is a, c, g, or t
  misc_feature (401)..(401): n is a, c, g, or t
  misc_feature (403)..(403): n is a, c, g, or t
  misc_feature (405)..(405): n is a, c, g, or t
  misc_feature (434)..(434): n is a, c, g, or t
tcacttagacaatgacagaaactgtacctcttaggtaacgtcttagttatctcaggacaggataaagagctgcgcancggccnccttctcagaacacaggcctcttcctccttcggggactgacaagaagcttggagccctcagcgggatgggccgggccactgatctgaggatgcttcacttctgtctgggttaagctgagaaagtgccacaggntctgatctcacacagcgtgctgtttctagccagcctctgcctggattttgcagtcaaagtcaggttgatntgaagccgaattcnttntgatgcctgacccccttgtttgtccagtggagcccatttaaaaantcanntancagttcagaagacaattttcatatagcaagaaagttagctgcttntntntttggtgaagtttttctgtgaaacagatntatatatgtgaacattggcttttttggttagcattttccagtgttcaaaatggcttccttccctggg

SEQ ID NO: 2899 - DNA, 501 bp, Mus musculus; identical to SEQ ID NO: 2898
  misc_feature (77)..(77): n is a, c, g, or t
  misc_feature (83)..(83): n is a, c, g, or t
  misc_feature (216)..(216): n is a, c, g, or t
  misc_feature (286)..(286): n is a, c, g, or t
  misc_feature (300)..(300): n is a, c, g, or t
  misc_feature (303)..(303): n is a, c, g, or t
  misc_feature (348)..(348): n is a, c, g, or t
  misc_feature (352)..(353): n is a, c, g, or t
  misc_feature (356)..(356): n is a, c, g, or t
  misc_feature (401)..(401): n is a, c, g, or t
  misc_feature (403)..(403): n is a, c, g, or t
  misc_feature (405)..(405): n is a, c, g, or t
  misc_feature (434)..(434): n is a, c, g, or t

SEQ ID NO: 2900 - DNA, 410 bp, Mus musculus
  misc_feature (154)..(155): n is a, c, g, or t
  misc_feature (326)..(326): n is a, c, g, or t
  misc_feature (331)..(332): n is a, c, g, or t
  misc_feature (345)..(345): n is a, c, g, or t
gcccacgttgggatggctgactttggtcattactgtgcctacatccggaatcccgtggatggaaagtggttctgcttcaatgactcacatgtttgttgggtcacctggaaggatgtccagtgtacctatgggaaccacagataccgctggcggnnaacggcctatctcttggtttacacgaagactggatcctgacagatatactcacacctccagagagggatagactcttatctcctctcctgtacccttgtctgctgcatttcaacgagaataataatttaaaaacaattaagccctatttataagcaaaactattattgcanatggnntagatgtagtttntctcctgaaagctcacacacggaaggcttggtctttagatggcagtgcttaggtgacagaacttg

SEQ ID NO: 2901 - DNA, 410 bp, Mus musculus; identical to SEQ ID NO: 2900
  misc_feature (154)..(155): n is a, c, g, or t
  misc_feature (326)..(326): n is a, c, g, or t
  misc_feature (331)..(332): n is a, c, g, or t
  misc_feature (345)..(345): n is a, c, g, or t

SEQ ID NO: 2902 - DNA, 550 bp, Mus musculus
  misc_feature (172)..(172): n is a, c, g, or t
  misc_feature (412)..(417): n is a, c, g, or t
  misc_feature (419)..(421): n is a, c, g, or t
catcttgtgctgcaaagaaagctctgatcccaacagttgcaacagcgccggccagctgatgccgagtaaaatggatacctgctctagtcacctgaataacagcatatacaaaaagctattagcttagggaaagggttgctggaaggttccatgagaaaaggttggaaagccnacagcggggaatcccattagtccctgcaaagaactgtatttacttcgaaacctaaaaaacaaccaatatccgatatgcacgaatacttctgctatcaagagtctagattggataattaccagcaaggtgacgggaacggaaataaaggtgtccagtgttgctagtgctatgatagtaactggatgtcacttcttatatatctaggtgactttaatatatagatggtatgcacacactcannnnnnannnaggagggaatctgcactttgacacatttttgtttattccctggccgttactatggaaataatctgattctctgacttaataaacaaagtctgagttggtgggtgttagcactgggcagctggagatcct

SEQ ID NO: 2903 - DNA, 550 bp, Mus musculus; identical to SEQ ID NO: 2902
  misc_feature (172)..(172): n is a, c, g, or t
  misc_feature (412)..(417): n is a, c, g, or t
  misc_feature (419)..(421): n is a, c, g, or t

SEQ ID NO: 2904 - DNA, 550 bp, Mus musculus
  misc_feature (38)..(40): n is a, c, g, or t
  misc_feature (89)..(90): n is a, c, g, or t
  misc_feature (397)..(397): n is a, c, g, or t
  misc_feature (473)..(473): n is a, c, g, or t
  misc_feature (489)..(489): n is a, c, g, or t
agagcaagctgctgctctcgcaagctttggaggcagannngccgcaatgttccggatcgagggtctcgcgcccaagttggacccggagnngatgaagcggaagatgcgtgaggatgtggtctcctccattcggaacttcctcatctacgtggccctgctgcgagtcactccatatatcttaaagaagctggatagcatctgaggacgggcagtcaggtggatgcatggcatgaagacctggtgacggcttctcctcctgtctgcagctgaattggcccagaaaggtgtaaggctgattaaacggacatataaactacttgttgagaacaagtaggactttgagaactgacctccatagctgaaatataaagccacttgggaagtgcaaaaagatgtnttgtgttcatggtgcccttaggcccatgaactccacccctgtgagtgttgatggagtggttaataatgtcaggctntaaggggagtcatttntgtttaccacttctgttcaaagtgttatttgtgaagtctgtttggaagtcagcatacaccc

SEQ ID NO: 2905 - DNA, 550 bp, Mus musculus; identical to SEQ ID NO: 2904
  misc_feature (38)..(40): n is a, c, g, or t
  misc_feature (89)..(90): n is a, c, g, or t
  misc_feature (397)..(397): n is a, c, g, or t
  misc_feature (473)..(473): n is a, c, g, or t
  misc_feature (489)..(489): n is a, c, g, or t

SEQ ID NO: 2906 - DNA, 384 bp, Mus musculus
  misc_feature (49)..(71): n is a, c, g, or t
  misc_feature (177)..(177): n is a, c, g, or t
  misc_feature (182)..(182): n is a, c, g, or t
  misc_feature (317)..(319): n is a, c, g, or t
  misc_feature (322)..(322): n is a, c, g, or t
  misc_feature (329)..(329): n is a, c, g, or t
  misc_feature (331)..(331): n is a, c, g, or t
  misc_feature (336)..(336): n is a, c, g, or t
  misc_feature (340)..(340): n is a, c, g, or t
  misc_feature (343)..(343): n is a, c, g, or t
  misc_feature (347)..(347): n is a, c, g, or t
tcggctgggacctttcgttcatgtagcaggaaccggagatggttgcgtnnnnnnnnnnnnnnnnnnnnnnnaaatctgaaaactgtgcaatgtattgagaacactctgtaccatgtgcaaggagtacgctggtcccaaggtgtaaagctttaaatcatttatgtaaaatgtttaatntctantcgctctcagtgcaaaacaaaaagagaaactagaaaatgtagaacgaaggaaaaagatgagaaaaaggaaaaagcatgtatatttgtacaaaaagttaaaaaattatgctaatttaatatttgtatttatccatnnntgnatccctntnccacncaantgntggnttattgattattaccaaaggcactagaaatcaccagc

SEQ ID NO: 2907 - DNA, 384 bp, Mus musculus; identical to SEQ ID NO: 2906
  misc_feature (49)..(71): n is a, c, g, or t
  misc_feature (177)..(177): n is a, c, g, or t
  misc_feature (182)..(182): n is a, c, g, or t
  misc_feature (317)..(319): n is a, c, g, or t
  misc_feature (322)..(322): n is a, c, g, or t
  misc_feature (329)..(329): n is a, c, g, or t
  misc_feature (331)..(331): n is a, c, g, or t
  misc_feature (336)..(336): n is a, c, g, or t
  misc_feature (340)..(340): n is a, c, g, or t
  misc_feature (343)..(343): n is a, c, g, or t
  misc_feature (347)..(347): n is a, c, g, or t

SEQ ID NO: 2908 - DNA, 153 bp, Mus musculus
cttgaccttctattggtacccatgaaaaagcacaaggtcctagctccctgtagatacacactccagttctgttgggtagactctactcctaacaggggtcctagagggttctctggaggatgggaaaggaacagtctcatgtcctgccaaata

SEQ ID NO: 2909 - DNA, 153 bp, Mus musculus; identical to SEQ ID NO: 2908

SEQ ID NO: 2910 - DNA, 384 bp, Mus musculus
  misc_feature (304)..(304): n is a, c, g, or t
  misc_feature (310)..(310): n is a, c, g, or t
  misc_feature (317)..(317): n is a, c, g, or t
  misc_feature (338)..(338): n is a, c, g, or t
  misc_feature (341)..(341): n is a, c, g, or t
cctggactttggtatctttagaaatgtgagtttgttttagagggtcttatttgttaccccagctggcttcaaattcaaaatcgccctgacttatactgagggctgagattacaggcgtataccacaatgccttatctgtcctttatttctgtttttaaatagaactcactgggaaattatgggtactggagcactgagacaaatcttcctttagtgccgttcacaacgcttgctttcctctccttcagacccagggcatttgcttttcaggcctgccttcctgagtcaggtttccagtactgcntgctgntcttttntcagagaacgcaggtcacctnttntcaaggcacttttgggattttacactgacagaagactagaaca

SEQ ID NO: 2911 - DNA, 384 bp, Mus musculus; identical to SEQ ID NO: 2910
  misc_feature (304)..(304): n is a, c, g, or t
  misc_feature (310)..(310): n is a, c, g, or t
  misc_feature (317)..(317): n is a, c, g, or t
  misc_feature (338)..(338): n is a, c, g, or t
  misc_feature (341)..(341): n is a, c, g, or t

SEQ ID NO: 2912 - DNA, 83 bp, Mus musculus
tacatcatctgtaccctgaaccgctgtcccctaggctccatccttaaaaaccccagcatctctcccgcgatgcagctggggag

SEQ ID NO: 2913 - DNA, 83 bp, Mus musculus; identical to SEQ ID NO: 2912

SEQ ID NO: 2914 - DNA, 424 bp, Mus musculus
  misc_feature (28)..(28): n is a, c, g, or t
  misc_feature (43)..(43): n is a, c, g, or t
  misc_feature (67)..(67): n is a, c, g, or t
  misc_feature (146)..(146): n is a, c, g, or t
gaggtacgcagcagccagttcgcgcggnaggctgtggcgctcntcgcggcgaatctcccaggtgtcntctggggagactgaatacaatcctggcgaggctcgctgaacctagagtctaggcgctcagacatcagacccggcccgancctgattctctgcccaggagactactgcaccagggggtgggcggggcccaccctccagctcagggattggtagatggcatcaccaggaagtcccgcccctcgccggctgaggggagacctagcgtcggcctctgaggccgctgctgcatattttgcacaatctggggtgggagggaatccctactttcaaatcccacgtcccagtgaaagcacaaagaccacctgtggccttaatcctcaaaggtgactatcgctgcccattctcagcaataaacgtg

SEQ ID NO: 2915 - DNA, 424 bp, Mus musculus; identical to SEQ ID NO: 2914
  misc_feature (28)..(28): n is a, c, g, or t
  misc_feature (43)..(43): n is a, c, g, or t
  misc_feature (67)..(67): n is a, c, g, or t
  misc_feature (146)..(146): n is a, c, g, or t

SEQ ID NO: 2916 - DNA, 582 bp, Mus musculus
  misc_feature (26)..(40): n is a, c, g, or t
  misc_feature (81)..(81): n is a, c, g, or t
  misc_feature (92)..(92): n is a, c, g, or t
  misc_feature (98)..(98): n is a, c, g, or t
  misc_feature (147)..(147): n is a, c, g, or t
  misc_feature (187)..(187): n is a, c, g, or t
  misc_feature (259)..(259): n is a, c, g, or t
  misc_feature (261)..(261): n is a, c, g, or t
  misc_feature (322)..(324): n is a, c, g, or t
  misc_feature (326)..(329): n is a, c, g, or t
  misc_feature (331)..(345): n is a, c, g, or t
  misc_feature (347)..(347): n is a, c, g, or t
  misc_feature (349)..(352): n is a, c, g, or t
  misc_feature (354)..(358): n is a, c, g, or t
  misc_feature (360)..(363): n is a, c, g, or t
  misc_feature (365)..(365): n is a, c, g, or t
  misc_feature (367)..(367): n is a, c, g, or t
  misc_feature (369)..(373): n is a, c, g, or t
  misc_feature (416)..(417): n is a, c, g, or t
  misc_feature (426)..(426): n is a, c, g, or t
  misc_feature (486)..(486): n is a, c, g, or t
  misc_feature (488)..(488): n is a, c, g, or t
  misc_feature (546)..(546): n is a, c, g, or t
  misc_feature (553)..(553): n is a, c, g, or t
agtgtggccacaggaaaatgactctnnnnnnnnnnnnnnnccccacagtgactgaaggccccaggaaagaagacaggagtntgtgaagaatnttttcnaaatggtgcaataattgacttatttccctcgggtccccactagaggatngaggctagatgccttgtgagaaatgcctttgagtttactntccccaacgtttttataatattgtatataagactatgaccgattgtatttctataagggagacgatggcatntntgccgcctgcttcgtttttatacgacttttttttaattaaagttttggatctttggaggannnannnnannnnnnnnnnnnnnnanannnnannnnntnnnngnanannnnncagtcagtgcctgtggccaaggtcaccagctgcagcccccagnngccaaggcntgtgggttcgctataaatgtaaacatggtgttttaggattgagcacaggttatttttaantntgctactttgagccataatttgccccacccccaccccctgtatcccaagtgggaaaanccttggntccactgatgtggctgaccattccttttt

SEQ ID NO: 2917 - DNA, 582 bp, Mus musculus; identical to SEQ ID NO: 2916
  misc_feature (26)..(40): n is a, c, g, or t
  misc_feature (81)..(81): n is a, c, g, or t
  misc_feature (92)..(92): n is a, c, g, or t
  misc_feature (98)..(98): n is a, c, g, or t
  misc_feature (147)..(147): n is a, c, g, or t
  misc_feature (187)..(187): n is a, c, g, or t
  misc_feature (259)..(259): n is a, c, g, or t
  misc_feature (261)..(261): n is a, c, g, or t
  misc_feature (322)..(324): n is a, c, g, or t
  misc_feature (326)..(329): n is a, c, g, or t
  misc_feature (331)..(345): n is a, c, g, or t
  misc_feature (347)..(347): n is a, c, g, or t
  misc_feature (349)..(352): n is a, c, g, or t
  misc_feature (354)..(358): n is a, c, g, or t
  misc_feature (360)..(363): n is a, c, g, or t
  misc_feature (365)..(365): n is a, c, g, or t
  misc_feature (367)..(367): n is a, c, g, or t
  misc_feature (369)..(373): n is a, c, g, or t
  misc_feature (416)..(417): n is a, c, g, or t
  misc_feature (426)..(426): n is a, c, g, or t
  misc_feature (486)..(486): n is a, c, g, or t
  misc_feature (488)..(488): n is a, c, g, or t
  misc_feature (546)..(546): n is a, c, g, or t
  misc_feature (553)..(553): n is a, c, g, or t

SEQ ID NO: 2918 - DNA, 229 bp, Mus musculus
  misc_feature (49)..(49): n is a, c, g, or t
  misc_feature (164)..(164): n is a, c, g, or t
gcggtgacgacctccctacgagaacatgcctgtgagttccttggtccangtttcgacagagaactcgctcttgggtccgcacggtcctcttgcgctaattgcgggtcctacagggtccacatgtgcgctctggtctcttaggacagtaaccagagccgcggcgncccacgggtcagccgcgtagacgggagcggagaggagataagatggcggcccagctacgcagaca

SEQ ID NO: 2919 - DNA, 229 bp, Mus musculus; identical to SEQ ID NO: 2918
  misc_feature (49)..(49): n is a, c, g, or t
  misc_feature (164)..(164): n is a, c, g, or t

SEQ ID NO: 2920 - DNA, 564 bp, Mus musculus
aaagggacatactttctgtgtccacaagagatgctgtagaattagagattatagactaagaggtggaggcaggttaagttacatggtattatttaatgaaacttacattttggaaaagaaatctggcatagtagaacccagtggaaatagtttgaaggtacattgtatgactcctatgttggctttattaagtaaggtatagaaatgtattatcttgtatgtattctaatgactaggcatcattgttttagtaccaattctctttgcctctatgttataacccctaagaagcacgcgggactgttcgtctttaaatcagtggccattctatctgactactatgactttttgttgttgttctgctttgggttttcagtctgcctgcatcagtcttctcctctgtatacgtctgtcttcaacaaatgtaaggactaaatacccctcccgatcacatccattatcaaggatttgaagccactccatgtactgggttataaaagaaatgttctcatgaactttcatgaagtttacatacctttggggatctagtcaccgagtcacata

SEQ ID NO: 2921 - DNA, 564 bp, Mus musculus; identical to SEQ ID NO: 2920

SEQ ID NO: 2922 - DNA, 182 bp, Mus musculus
  misc_feature (78)..(98): n is a, c, g, or t
tggcagctgcaatggagaaccccaaccttcgggaaatcgtggaacagtgcgtcctcgagccggactgacccctccctnnnnnnnnnnnnnnnnnnnnngttggatctgctagtttcaatcctttgtaagatgtagaggacacatgttgactagataggtgatttgtacctcagagctttttt

SEQ ID NO: 2923 - DNA, 182 bp, Mus musculus; identical to SEQ ID NO: 2922
  misc_feature (78)..(98): n is a, c, g, or t

SEQ ID NO: 2924 - DNA, 319 bp, Mus musculus
ctgatgggtttctggcttccatggtcaccagacatatatgtggtaaagacatatgcagccaaaatatcctacacacctaatctgtcaacagttgccataccatcgtctgaggaggacagaaaggtctgttcctgacactctagccctgtggttctgcagatggttggaacctgcctggcttgggcctacagagcaacagcaccctcccagcatggagtcacatgacccaagtactgctcagaaccctgtcctatccccaggctacacagtccacacagatgacaggccactttcctgctgctaagatgggaccaataac

SEQ ID NO: 2925 - DNA, 319 bp, Mus musculus; identical to SEQ ID NO: 2924

SEQ ID NO: 2926 - DNA, 353 bp, Mus musculus
cctgagtgccgactagctttactgaagcacccaccatgatgcccgagccacagtctggccctgctgctgtaggccaccctgatgctcagagagaggacaggaaaagtgagttagaggccagggagacttgactgagttgggtttctaggtaggaagggttaggcagagggcttggtgctacggtcagatttgcagccgctaacacattcctgtgtgaggccaccaccgtctgccagttattgtgaatatgtgtattttaagcaataagattcagttgctcagactgccctgagcggtctgggtgacgatatcctgtgattgtccggaagacagagtggctccaaccactgtga

SEQ ID NO: 2927 - DNA, 353 bp, Mus musculus; identical to SEQ ID NO: 2926

SEQ ID NO: 2928 - DNA, 321 bp, Mus musculus
  misc_feature (87)..(110): n is a, c, g, or t
  misc_feature (157)..(158): n is a, c, g, or t
  misc_feature (200)..(200): n is a, c, g, or t
  misc_feature (269)..(286): n is a, c, g, or t
agacctatcaggatgcagagtcacggcaggtgctggctacctggatgaaggagcggcaagaactgagatgcatcacaaaggccctannnnnnnnnnnnnnnnnnnnnnnnttccgcaccttccacaaccctacctacttctcccggcgcctcgtgcnnttctccgacctctacatggcctcactcagctgcctgctcaantaccgcgtagacttcaccttctacccgcgccgcacacccctgcagcacgaggcacccctctggatggannnnnnnnnnnnnnnnnncatgaagacaccctttcttggtgacatggcccaca

SEQ ID NO: 2929 - DNA, 321 bp, Mus musculus; identical to SEQ ID NO: 2928
  misc_feature (87)..(110): n is a, c, g, or t
  misc_feature (157)..(158): n is a, c, g, or t
  misc_feature (200)..(200): n is a, c, g, or t
  misc_feature (269)..(286): n is a, c, g, or t

SEQ ID NO: 2930 - DNA, 508 bp, Mus musculus
ggaagaatctttttgtcaggcctgatggtttctatagactcagatgggaacttgagtttcaaatttggtgatttttcactgagaaacagttgtattttcttaatattggcatttatattatagtgagcaaaactatcattccattaggagaaatctaatgtagctatgttgatggctcatgagtaccatttataacagaaacaatgttaaatacagatgatactctagacattatgcatttttatatttaacatgagaaagatatgtagctattgtttctgttggacccagatggtagaaatactgagtggatagactgctctgctgataaaatttttccaaagcagctgagaaaggcttcataagacagcatgaaggtacactggggaatatggaacatttcctgtgagcacagaactgaactttctctgcaagcttacattacagtgtgctgaaacactaagttataaggtgtcatgcaaatactgtgctctgactcatgttacaa

SEQ ID NO: 2931 - DNA, 508 bp, Mus musculus; identical to SEQ ID NO: 2930

SEQ ID NO: 2932 - DNA, 330 bp, Mus musculus
  misc_feature (182)..(196): n is a, c, g, or t
atattgctcagctgaatccagaggctctgggaaacattagaaagctctcgagccgcctcgcccagatctgcagcagcatacggacgggccgatgagaggacaacaggacacacagtggcagcagggactgtggtagcagagtgcacacatctgtccttcttctgtggggtccttcactgccnnnnnnnnnnnnnnngctttgtctctctgacagctatggtgtcttgctgcacacttctagttagtgggaattttagacggggaacacagggctagtcagggcctttgtgtgcttggtgtggagtgactgagaaccgtctatggttcaag

SEQ ID NO: 2933 - DNA, 330 bp, Mus musculus; identical to SEQ ID NO: 2932
  misc_feature (182)..(196): n is a, c, g, or t

SEQ ID NO: 2934 - DNA, 458 bp, Mus musculus
  misc_feature (310)..(310): n is a, c, g, or t
  misc_feature (345)..(345): n is a, c, g, or t
  misc_feature (358)..(358): n is a, c, g, or t
  misc_feature (425)..(425): n is a, c, g, or t
  misc_feature (431)..(431): n is a, c, g, or t
cgtaatcctcagagcgctaatgtgatctgattggattggacagatggggcccatgtttcgtcctgatacttaacccttagttccttgatgttctactttctttgttgtgtcatacaggccctgagttggacatttctcaaacttatatatgtggtgttatatagaccttaagtcatttgtaccctggaacattttggaaattatttcatctggagggaagtggcagtaggctgaaaatactgactgatgcatagtagaaatctcagataatggacctacacaatgttttgttttccaaggggttataaantattggtcaaaatagttgtgtttatttaccctgtntctaatagtggtnttctaatttgatcacaatctagtcaatgccagctgttaatattttgtattaggcaattataaaatancgttgnattgctgtcttaagcttataagtgact

SEQ ID NO: 2935 - DNA, 458 bp, Mus musculus; identical to SEQ ID NO: 2934
  misc_feature (310)..(310): n is a, c, g, or t
  misc_feature (345)..(345): n is a, c, g, or t
  misc_feature (358)..(358): n is a, c, g, or t
  misc_feature (425)..(425): n is a, c, g, or t
  misc_feature (431)..(431): n is a, c, g, or t

SEQ ID NO: 2936 - DNA, 74 bp, Mus musculus
gtctgaccgcaacctgtcctttgtggcccgacagatggccctgcatgcaaatatggcctcacaggtacaccaca

SEQ ID NO: 2937 - DNA, 74 bp, Mus musculus; identical to SEQ ID NO: 2936

SEQ ID NO: 2938 - DNA, 85 bp, Mus musculus
acctacccagaaggacggcattagagagcagaacccggaaccaaggagattcagactcctgaggattccttaatgccccaacatc

SEQ ID NO: 2939 - DNA, 85 bp, Mus musculus; identical to SEQ ID NO: 2938

SEQ ID NO: 2940 - DNA, 307 bp, Mus musculus
cccacagcaacaaggagaagacggctcagcccaatggagactggacataccagacagtctcctacctagccctaaccccttcctacggggacgtctacacctgcgtggttcagcacagcgggacctctgagcccatccgcggggactggacacctgggctgtcccccatccagacagtgaaggtctctgtgtctgcagccaccctgggcctgggcttcatcatcttctgtgttggcttcttcagatggcgcaagtctcattcctccagctacactcctctccctggatccacctacccagaaggacg

SEQ ID NO: 2941 - DNA, 307 bp, Mus musculus; identical to SEQ ID NO: 2940

SEQ ID NO: 2942 - DNA, 244 bp, Mus musculus
  misc_feature (177)..(177): n is a, c, g, or t
ttggccgctgaaagcggaatggaccggccctttaggcgcgttaaccgcgggtttgtggtgataagcggggcagggtaaattgaaaccctagcggggtctttgatttcccgcctttcgaaattcggtttccgaaagttaatgggcctttggtccattggtttgcgcttccaaaaattntaggggatgtctggcaccctaaaggttccttggggcccatttaagcgtgtcatggaaacccactcgt

SEQ ID NO: 2943 - DNA, 244 bp, Mus musculus; identical to SEQ ID NO: 2942
  misc_feature (177)..(177): n is a, c, g, or t

SEQ ID NO: 2944 - DNA, 107 bp, Mus musculus
  misc_feature (65)..(65): n is a, c, g, or t
aaggtctcggtgctgatagtccagcagactgatacctccgacccagagaaggttgtttcagcctncctgaaggtggcatctgtgttcagggatgacgcctcagtaaa

SEQ ID NO: 2945 - DNA, 107 bp, Mus musculus; identical to SEQ ID NO: 2944
  misc_feature (65)..(65): n is a, c, g, or t

SEQ ID NO: 2946 - DNA, 185 bp, Mus musculus
  misc_feature (112)..(112): n is a, c, g, or t
cttagtgcagcctggagggtcccttaaactctcctgtgcagcctctggattcactttcagtgattacgaatggcgtgggttcgactggctccaaggaaggggcctgagtggntagcaagcattagtaatttggcatatagtatatattatgcagacaatgtgacgggccgattcaccatctctag

SEQ ID NO: 2947 - DNA, 185 bp, Mus musculus; identical to SEQ ID NO: 2946
  misc_feature (112)..(112): n is a, c, g, or t

SEQ ID NO: 2948 - DNA, 581 bp, Mus musculus
  misc_feature (383)..(383): n is a, c, g, or t
ccatatttgaattggcctgaacagatgtaaatcgggaaggatgggaaaaactgcagtcaccaacaatgattaatcagctgttgcaggcagtgtcttaaggagactggtaggaggaggcatggaaacccaaaggccgtgtgtgtttagaagcctaactgtcacatcaagcatcatcgtccccatgcaacaacaaccatcaccttatacatcacttcctgttttatgcagctcaaaaaacatagactgaagatttattttttaatatgttgactttgtttctcagcaaagcattggtcatgtgtgtatttttccatagtcccaccttggagcatttatgtagacattgtaaataaattttgtccaaaaaggactggaaagatganctgtattattgcatttattattattttttttgtgaacgtagcagattagtgcgaggtggcatgcatataaggttaactgagtggggtacgctaattatactttttgttgtggataaagaaatgcttgtcaatagcctttttctatcaaggaaacgaggagctaattattaataacagtcatggcacactgtgtcctat

SEQ ID NO: 2949 - DNA, 581 bp, Mus musculus; identical to SEQ ID NO: 2948
  misc_feature (383)..(383): n is a, c, g, or t

SEQ ID NO: 2950 - DNA, 398 bp, Mus musculus
  misc_feature (28)..(28): n is a, c, g, or t
  misc_feature (91)..(92): n is a, c, g, or t
  misc_feature (139)..(154): n is a, c, g, or t
  misc_feature (211)..(211): n is a, c, g, or t
  misc_feature (241)..(241): n is a, c, g, or t
  misc_feature (246)..(246): n is a, c, g, or t
  misc_feature (273)..(273): n is a, c, g, or t
  misc_feature (348)..(348): n is a, c, g, or t
  misc_feature (351)..(353): n is a, c, g, or t
  misc_feature (362)..(362): n is a, c, g, or t
  misc_feature (364)..(364): n is a, c, g, or t
  misc_feature (367)..(367): n is a, c, g, or t
caagcttctgagatgaagaacccggagnaagcggcagacgggaaacagcgtattcacctgcgccctggctcgctgcgtggtgccgcaccgnntaagctgcacctcctgccctgcgacgttctagtcagccggccggccnnnnnnnnnnnnnnnncacgcccgccgtccgccacgatgcagacgggctacaggcgtcgtttcgcggtcgcgncctgcggggcgaggaggtagctgtgccgcncaggntttgcgggattcgtgatggtgacggangagaagggagaggggttgatagggaaactgaacttctccggggacgcggaggacaaagcggacgaggcgcagganccnnntggagcggnanttngaccgccttatcggggccaccggcagcttca

SEQ ID NO: 2951 - DNA, 398 bp, Mus musculus; identical to SEQ ID NO: 2950
  misc_feature (28)..(28): n is a, c, g, or t
  misc_feature (91)..(92): n is a, c, g, or t
  misc_feature (139)..(154): n is a, c, g, or t
  misc_feature (211)..(211): n is a, c, g, or t
  misc_feature (241)..(241): n is a, c, g, or t
  misc_feature (246)..(246): n is a, c, g, or t
  misc_feature (273)..(273): n is a, c, g, or t
  misc_feature (348)..(348): n is a, c, g, or t
  misc_feature (351)..(353): n is a, c, g, or t
  misc_feature (362)..(362): n is a, c, g, or t
  misc_feature (364)..(364): n is a, c, g, or t
  misc_feature (367)..(367): n is a, c, g, or t

SEQ ID NO: 2952 - DNA, 282 bp, Mus musculus
cgtcctctcctgatagctaacataggcctgtgtgttgcgttcacattcatgttctacttaatcctctcaagacagcaaccctgggaaggagcctcgcagggacctccccagacaagaagaaaagcaaagaaggaagggtgattaataagcacaggcagtttcccctattcccttaccctagagtccccacctcaatggccacagcctgccacaggaaccccttggcaaaggctggagctgctctgtgccaccctcctgacctgtcagggaatcagagggccc

SEQ ID NO: 2953 - DNA, 282 bp, Mus musculus; identical to SEQ ID NO: 2952

SEQ ID NO: 2954 - DNA, 297 bp, Mus musculus
  misc_feature (249)..(263): n is a, c, g, or t
cgggccgagctctagagccgtcagcccagagctgatttatccagagcccagcatgggtttcctgactgccgtgactcaaggcctggtgcggggagctgacaggatgagcaagtggacaagcaagcggggaccacgcaccttcactaagagtcggggtgccaagaaaacaggcatctatacttctgataggaagtttgtgcaaataaaagaaatggttccagaatttgtcgtcccggacttgacgggctnnnnnnnnnnnnnnnacgttaattaccgagctcctgcaggcatagacac

SEQ ID NO: 2955 - DNA, 297 bp, Mus musculus; identical to SEQ ID NO: 2954
  misc_feature (249)..(263): n is a, c, g, or t

SEQ ID NO: 2956 - DNA, 581 bp, Mus musculus
  misc_feature (201)..(201): n is a, c, g, or t
  misc_feature (227)..(227): n is a, c, g, or t
  misc_feature (243)..(243): n is a, c, g, or t
  misc_feature (267)..(267): n is a, c, g, or t
tagtagtgggcatcacatcgggcgtgtgggtctggtccggcaagactctggagtcctggcgcgcgttgtgcactaggtgctgctgggccagcaagggcgctgcagtaggcgcgggcgctggaggcagcggccctgggggcagtggacccgggcccggcggaggtgggggacacggcggaggcgggggatccctctacagcnacgtcagtaccggcctgacgtggcgntctggcacggccagcntctgtatcttaccctaagcaaatnccattgtcccaggtctgaaccctacgtggatgcccagaaggggcggagaggagtggggggatggagaacccgtgggcggcgaagggaccccagaccggccagggttcccaccccttcccagtgttgactgctattagcatgataatgaactcttaatggtatccattagcagcggggacttaaatgactcccttagaacaaagtacctggcattgaagcctcccagacttagcccctcctctctgatgccccagcacttaccccagacaatggtttcagtgggttaggatagttggaaccctcctggataccct

SEQ ID NO: 2957 - DNA, 581 bp, Mus musculus; identical to SEQ ID NO: 2956
  misc_feature (201)..(201): n is a, c, g, or t
  misc_feature (227)..(227): n is a, c, g, or t
  misc_feature (243)..(243): n is a, c, g, or t
  misc_feature (267)..(267): n is a, c, g, or t

SEQ ID NO: 2958 - DNA, 592 bp, Mus musculus
  misc_feature (26)..(42): n is a, c, g, or t
  misc_feature (122)..(122): n is a, c, g, or t
  misc_feature (216)..(218): n is a, c, g, or t
  misc_feature (338)..(338): n is a, c, g, or t
  misc_feature (351)..(351): n is a, c, g, or t
  misc_feature (370)..(370): n is a, c, g, or t
  misc_feature (373)..(376): n is a, c, g, or t
  misc_feature (408)..(408): n is a, c, g, or t
  misc_feature (483)..(517): n is a, c, g, or t
  misc_feature (562)..(562): n is a, c, g, or t
ttcctcgccaggtgtacgatcccaannnnnnnnnnnnnnnnnagtacccagagctgagtgagcccacccacaatcaccacccgcacaactactacaactctgcctaggggcccccaaggggntggctgctgctcttggctggacccagctggcccagccaaccccatctcctgcatggcgtcctcccagccccctggcacctgcctatagggttannntttggggagatgaggccgaggggggcaatgggaagaagggggcccctcatccctggagctttcgcagggcccaacatagaactgggtgtccccaacagtgcccgaaggaagcactgagtngagctgtttcagntgcccccctttattccctnacnnnnaagtacctcccagaaccagaaacccttccagngaagcccccagaacccaggcttggcctgacccctgccccattcctgcgacgggagcagatgcatgcctggaaacnnnnnnnnnnnnnnnnnnnnnnnnnnnnnnnnnnnggtgtttgtggatgtgacagcagcgtttgtaactcgaacacattnttttctatttcactggagcacaataaatgg

SEQ ID NO: 2959 - DNA, 592 bp, Mus musculus; identical to SEQ ID NO: 2958
  misc_feature (26)..(42): n is a, c, g, or t
  misc_feature (122)..(122): n is a, c, g, or t
  misc_feature (216)..(218): n is a, c, g, or t
  misc_feature (338)..(338): n is a, c, g, or t
  misc_feature (351)..(351): n is a, c, g, or t
  misc_feature (370)..(370): n is a, c, g, or t
  misc_feature (373)..(376): n is a, c, g, or t
  misc_feature (408)..(408): n is a, c, g, or t
  misc_feature (483)..(517): n is a, c, g, or t
  misc_feature (562)..(562): n is a, c, g, or t

SEQ ID NO: 2960 - DNA, 522 bp, Mus musculus
  misc_feature (141)..(141): n is a, c, g, or t
  misc_feature (144)..(255): n is a, c, g, or t
  misc_feature (312)..(329): n is a, c, g, or t
gcctgctacttaagagggtgtatattgtactctgtgtgtgcgtgcgtgtgtgtgtgtgtgtgtgtgtgtgtgtgcgtgtgtgtgtgtgtgtgtgtgtgtgtgtgtgtgtagtgcccggcttagaaatgtgaacatctgaanctnnnnnnnnnnnnnnnnnnnnnnnnnnnnnnnnnnnnnnnnnnnnnnnnnnnnnnnnnnnnnnnnnnnnnnnnnnnnnnnnnnnnnnnnnnnnnnnnnnnnnnnnnnnnnnnnaatgcagacatcttggtactgatccctaaacacacccctttccctgataacccgacnnnnnnnnnnnnnnnnnnttgcacaagaatccacagcccgttcccagagctcatagccaagtgtgttgctcattccttgaatatttattctgtacctactattcatcagacatttggaattcaaaaacaagttacatgacacagccttagccactaagaagcttaaaattcggtaaggatgtaaaattagccaggatgaatagagggctgc

SEQ ID NO: 2961 - DNA, 522 bp, Mus musculus; identical to SEQ ID NO: 2960
  misc_feature (141)..(141): n is a, c, g, or t
  misc_feature (144)..(255): n is a, c, g, or t
  misc_feature (312)..(329): n is a, c, g, or t

SEQ ID NO: 2962 - DNA, 475 bp, Mus musculus
  misc_feature (351)..(351): n is a, c, g, or t
  misc_feature (353)..(353): n is a, c, g, or t
  misc_feature (397)..(397): n is a, c, g, or t
  misc_feature (450)..(450): n is a, c, g, or t
tgacggtttttagctgacattcatggagagaatgaatccttagaactgtgccgctagtgaaaggaaatcctgtctaagagtgtttctttacagagcagtgtcacaccatcctttgggccctctgctggaaacatagaatcaagtctcaaataatgccttttaaattgtctcctctagtattatagatgtaggacagtactgtatcatacctctgtgaatgtaacatagcttgtacctgctttatgatacgtagtagtgaccgtgctttatcagagctgttttttaatgatgttgctcagaatgttttctttccagatgatgattgagaagctaattaaaaaaaaaaaaaananaaacaaaaaatggtggcaggtacccacagagtaacagaactgtngctgttttctggggtttgtttttacttttttttttttttttttgataaagtgngctgatgctctacaatttgtcaatg

SEQ ID NO: 2963 - DNA, 475 bp, Mus musculus; identical to SEQ ID NO: 2962
  misc_feature (351)..(351): n is a, c, g, or t
  misc_feature (353)..(353): n is a, c, g, or t
  misc_feature (397)..(397): n is a, c, g, or t
  misc_feature (450)..(450): n is a, c, g, or t

SEQ ID NO: 2964 - DNA, 353 bp, Mus musculus
  misc_feature (29)..(29): n is a, c, g, or t
  misc_feature (90)..(90): n is a, c, g, or t
  misc_feature (92)..(92): n is a, c, g, or t
cagctcctatggagaggttggaaaggcgngaaccttcgaaggcgagacaccagtttgtgttcttgcacatggactagttctcatgtaacntnccacttccaccttctcgctgagctagttagaacctcgttccagctctccaccgttggtgcaatgaatacctactgaccatgcccactatgggccgtcacctaagctctgggcatggagagactaccttcttagattttggtaggaggtaagcctagtgtataggcctgcattccaatctaccaaggagcccgaggcagtgctgcaagggcagtgtgggcttgggagtgagttcaaggtaatctggaaaacctagtgagact

SEQ ID NO: 2965 - DNA, 353 bp, Mus musculus; identical to SEQ ID NO: 2964
  misc_feature (29)..(29): n is a, c, g, or t
  misc_feature (90)..(90): n is a, c, g, or t
  misc_feature (92)..(92): n is a, c, g, or t

SEQ ID NO: 2966 - DNA, 245 bp, Mus musculus
  misc_feature (27)..(27): n is a, c, g, or t
  misc_feature (135)..(135): n is a, c, g, or t
  misc_feature (213)..(213): n is a, c, g, or t
agccctgggctgcacctagatgttggnagtcaaggtgctgtgggtctggagggccgcagtcagaacaggacccatgggaaaggcaagggatggggaaggtctgggctggccctgccacggggaaggccggctggnctgcagcccgtttgctccctgggcaggtaaagtgtgggagtcacgggaaagcagcaggcccagtggatggaacagggnagaggtatcaagaagcccctgggcaaggcagg

SEQ ID NO: 2967 - DNA, 245 bp, Mus musculus; identical to SEQ ID NO: 2966
  misc_feature (27)..(27): n is a, c, g, or t
  misc_feature (135)..(135): n is a, c, g, or t
  misc_feature (213)..(213): n is a, c, g, or t

SEQ ID NO: 2968 - DNA, 371 bp, Mus musculus
  misc_feature (118)..(120): n is a, c, g, or t
  misc_feature (125)..(126): n is a, c, g, or t
  misc_feature (128)..(128): n is a, c, g, or t
  misc_feature (228)..(228): n is a, c, g, or t
  misc_feature (266)..(266): n is a, c, g, or t
  misc_feature (292)..(292): n is a, c, g, or t
tagctacctctgtagctcctcagtcctcacagcaaggcctgggttcaggcttctcttgctctctaagtttgaagctagattggtcctgtattgattttgcattgtatgttttgggttnnnttttnntnttttgtgtccagaaaataattttctgttttgcatgtctgagatgccgtgctgattgctttggaatgtttactctgtggccatttcctttcctgcttgcancatgtgtgctaactgcaaagccttgtcagcagtttggngtatcctgtactttaggctttgcccnattctacatctgacttgggtgttgagtccagtctctctcatgagaactgatagctcagtggggcccatgtaggttgaca

SEQ ID NO: 2969 - DNA, 371 bp, Mus musculus; identical to SEQ ID NO: 2968
  misc_feature (118)..(120): n is a, c, g, or t
  misc_feature (125)..(126): n is a, c, g, or t
  misc_feature (128)..(128): n is a, c, g, or t
  misc_feature (228)..(228): n is a, c, g, or t
  misc_feature (266)..(266): n is a, c, g, or t
  misc_feature (292)..(292): n is a, c, g, or t

SEQ ID NO: 2970 - DNA, 563 bp, Mus musculus
  misc_feature (69)..(69): n is a, c, g, or t
  misc_feature (144)..(144): n is a, c, g, or t
  misc_feature (400)..(400): n is a, c, g, or t
  misc_feature (412)..(412): n is a, c, g, or t
  misc_feature (447)..(447): n is a, c, g, or t
  misc_feature (451)..(451): n is a, c, g, or t
  misc_feature (496)..(496): n is a, c, g, or t
  misc_feature (502)..(502): n is a, c, g, or t
caatagcaacagcatgagcaccccacagccagcagcaccagagagccccactgagggccccagaggccnagcagggaaggctgcggtaggtgtccgggagaagggcccttggctctgtcagcgactgccctctattggtggaanccactgaagcgggtgctgtggaaagcggggagctgcgttggccacctgagggtacacagagaggtacccctcagatccaggctgctgctgctccttccctaagtccaccagggaaggaagcagatgatgatgtcatccagggtgccagctccgggcaccaggcattccctgctccagtaacagatgcgggtgtggcaggctctactctctgaccaccaagaggacctccatcccaggatgacaggctgattcacanaaaaggctgggnccacacaggaggcccagctcgccaagcttcctgtntggntgggtgtggccaggaccccagcccctgcctttgcgctccatggtntagatntggaacatacccctctttgttcagtggcttgaagcagaaataaaggcatccttcctggtgg

SEQ ID NO: 2971 - DNA, 563 bp, Mus musculus; identical to SEQ ID NO: 2970
  misc_feature (69)..(69): n is a, c, g, or t
  misc_feature (144)..(144): n is a, c, g, or t
  misc_feature (400)..(400): n is a, c, g, or t
  misc_feature (412)..(412): n is a, c, g, or t
  misc_feature (447)..(447): n is a, c, g, or t
  misc_feature (451)..(451): n is a, c, g, or t
  misc_feature (496)..(496): n is a, c, g, or t
  misc_feature (502)..(502): n is a, c, g, or t

SEQ ID NO: 2972 - DNA, 535 bp, Mus musculus
  misc_feature (52)..(52): n is a, c, g, or t
agacccctgttctgggcttatttattaatcttgatttaatacgttctcttcncaagctggaagatcctctttccaggcctctctaaccaagtctcaaatatccaggcagagttttagtatgacattgtgtgatgaatgcaaatcaacacacagaataaatggctctttctcaccttatgtcatgaatgttttggacatcaagcatcctaatggtacctcctttgtacaatgccaaaatgagcctcggtgtcagaggatacaacaaaaacagcaattttgatgcctttgaaatgatgaagggattctacctgtatttttactcttagaacagatacaactttaaagggtgtcacaaccaaaggtggagtggagtgtggcatgcaggctctgtgggggcgccagtgctcagttagttgttggttatttaaagcacactcagtttgcactcatttcccctaaacaactggcacagcaggttgaccatccttaaactgctgtgaaacatgccacgtcctgcaggcgtccagtcaatcat

SEQ ID NO: 2973 - DNA, 535 bp, Mus musculus; identical to SEQ ID NO: 2972
  misc_feature (52)..(52): n is a, c, g, or t

SEQ ID NO: 2974 - DNA, 318 bp, Mus musculus
  misc_feature (56)..(56): n is a, c, g, or t
tggaggtccagacaatgatgaccacctcttctccctgcttcccacatcccctcccntgcaccctcctcaggagctgccagcccctgggggcatggtggcctggcacctggtttgagccctgcggagctgtgctcgggggccctggactctgaacctgtgacccctcgctgtgtacggaacttgccccctcctggggggccttgggccctctccttttcttcttttagggggtaacttcatttatttcttctccctccatttgcctcccccccaattttcctgttttaaaccgaatggcacgaaatcgttttcctcacc

SEQ ID NO: 2975 - DNA, 318 bp, Mus musculus; identical to SEQ ID NO: 2974
  misc_feature (56)..(56): n is a, c, g, or t

SEQ ID NO: 2976 - DNA, 297 bp, Mus musculus
  misc_feature (154)..(154): n is a, c, g, or t
  misc_feature (165)..(165): n is a, c, g, or t
  misc_feature (182)..(182): n is a, c, g, or t
  misc_feature (243)..(243): n is a, c, g, or t
aaccatgtacaaaggggctccactccactgtccctgtacaaggacttttgacagtttagtgcttagtaactagtcttagttttcttccttttagaaaaactgtacatttgatctctcaattctgtttgcaaagcagtgcagaaaactataatcnaatgtgacatntctataaaataattttnacataacagacatgaacagacataagaacggcttccaatgttaattgataatctataaatntcattttggaatttgactggttcacaaatatatccacaaaatgtttgcatatgg

SEQ ID NO: 2977 - DNA, 297 bp, Mus musculus; identical to SEQ ID NO: 2976
  misc_feature (154)..(154): n is a, c, g, or t
  misc_feature (165)..(165): n is a, c, g, or t
  misc_feature (182)..(182): n is a, c, g, or t
  misc_feature (243)..(243): n is a, c, g, or t

SEQ ID NO: 2978 - DNA, 368 bp, Mus musculus
tggatgatcctctggcccaaaaaccctcctgctccagtcaccaggcagctccacccaggcatggtcaacactggaagcagatcacagttgtgcgaggttaatgtatcatggtcctggaggtggctagaaagagagatctggtgatttccccaaacccagtttcttcttcaaacctcccatagaacagatctccaagacatggagattaattcccacatcacacaccaacgtattccaataggtaccaataaactatcaactcatatggtgtggctatgtcaaagtatggctcctttacctaaatgcctgtctcaacctggaataattcacttgtgcttctgaagaaatagtcacaaattggggctcaa

SEQ ID NO: 2979 - DNA, 368 bp, Mus musculus; identical to SEQ ID NO: 2978

SEQ ID NO: 2980 - DNA, 349 bp, Mus musculus
  misc_feature (251)..(252): n is a, c, g, or t
ggttatttgctactttaacatctagagtatggtgcagtatgctgaatcttttgtttcaaagcaaatgttagtaaaaagctggtgtgcatagtcttgttacattgatgcagtttttcccattccaaggtctcatcaggtagactggcttgaagagagcctggaagaatgccatcagggtgtcagtctgaataggaagccatttcccacacggtttcctgtcccgtttatattttggacgtaacagaaaatgnnaaatgacagcagtggcccctgtgcatggttttcatgggtgcccttaatctcatgggcatgcctaacttgaaagtctgttctaactggcgcttaaggc

SEQ ID NO: 2981 - DNA, 349 bp, Mus musculus; identical to SEQ ID NO: 2980
  misc_feature (251)..(252): n is a, c, g, or t

SEQ ID NO: 2982 - DNA, 288 bp, Mus musculus
  misc_feature (133)..(133): n is a, c, g, or t
ggaaatctcagcatccatccaagtctccagaaaggctgcaggaagtgctttaaccacagctggtgattggcagaaccgccgttgactgaagcatcacttcctcataggaagctcctctctgtatctgctgtgnagagctgcatgtggctcaggacccagccattcctggagcaagttagaaaagcccctgcaagtaaggctcaaattcgaaaacacttgtcaaccctcaaccctgcattcatattgagtcgtattccccagtaatcgtgtaagggaccattagtcagc

SEQ ID NO: 2983 - DNA, 288 bp, Mus musculus; identical to SEQ ID NO: 2982
  misc_feature (133)..(133): n is a, c, g, or t

SEQ ID NO: 2984 - DNA, 353 bp, Mus musculus
  misc_feature (125)..(125): n is a, c, g, or t
  misc_feature (179)..(179): n is a, c, g, or t
  misc_feature (199)..(199): n is a, c, g, or t
  misc_feature (209)..(209): n is a, c, g, or t
  misc_feature (240)..(240): n is a, c, g, or t
  misc_feature (247)..(247): n is a, c, g, or t
ggacacaaaactaggccttgccctgcaaggatagggctccaggggccatacccaatggggggggggaggttctagggcaaaaagggggtgggagctgtttttatttatttattaattaatttatnattttatttattgatcaatctctgcgggtggggtaggggagggatgggggtggnttagcagatccggacagggncctctgtctntgtgtcatccccaacccccagccccttcctnggccccntgctcccccccaggtcctgccccctcccctgtgaccttctgtacggatttgccctcccggaaggaattctggtttcgcgtgatcctgcctgcgtctgtgtctgatt

SEQ ID NO: 2985 - DNA, 353 bp, Mus musculus; identical to SEQ ID NO: 2984
  misc_feature (125)..(125): n is a, c, g, or t
  misc_feature (179)..(179): n is a, c, g, or t
  misc_feature (199)..(199): n is a, c, g, or t
  misc_feature (209)..(209): n is a, c, g, or t
  misc_feature (240)..(240): n is a, c, g, or t
  misc_feature (247)..(247): n is a, c, g, or t

SEQ ID NO: 2986 - DNA, 594 bp, Mus musculus
  misc_feature (83)..(84): n is a, c, g, or t
  misc_feature (87)..(87): n is a, c, g, or t
  misc_feature (93)..(93): n is a, c, g, or t
  misc_feature (114)..(114): n is a, c, g, or t
  misc_feature (119)..(119): n is a, c, g, or t
  misc_feature (197)..(240): n is a, c, g, or t
  misc_feature (322)..(322): n is a, c, g, or t
  misc_feature (357)..(377): n is a, c, g, or t
  misc_feature (400)..(400): n is a, c, g, or t
  misc_feature (417)..(417): n is a, c, g, or t
  misc_feature (446)..(446): n is a, c, g, or t
  misc_feature (508)..(508): n is a, c, g, or t
  misc_feature (534)..(561): n is a, c, g, or t
ctgcgtcatgcatacctactccgaagcagaggggtcgtctctggggacgtttgtattctggccgacagtcacagacttgaaanncgngccgcnttgatgagcgcactagctgcncaccncctgttcacagccccgttcagcctccagcgtgagttcttccaggaatatgcacagctcactcgctcttccctctgagnnnnnnnnnnnnnnnnnnnnnnnnnnnnnnnnnnnnnnnnnnnnaaagccatattgaattgttgccaaatgaaaaatgcatccaacagtcaagtgctgagaaggtgtcaagtggggatgataatgngtaatgattgggcaatgaatctctgagaggaagcnnnnnnnnnnnnnnnnnnnnnttccccggggagggatgggagtntagtgagcacaaggccntcacaggcttcccacaggaagtgacatgntttagggctttagagaaaataggtaagaggtttttgtgcatgatgtccttggtttttttttnactatttggatttcaagggagtgggnnnnnnnnnnnnnnnnnnnnnnnnnnnnacatagaaacttacagaataaaccaccatggtg

SEQ ID NO: 2987 - DNA, 594 bp, Mus musculus; identical to SEQ ID NO: 2986
  misc_feature (83)..(84): n is a, c, g, or t
  misc_feature (87)..(87): n is a, c, g, or t
  misc_feature (93)..(93): n is a, c, g, or t
  misc_feature (114)..(114): n is a, c, g, or t
  misc_feature (119)..(119): n is a, c, g, or t
  misc_feature (197)..(240): n is a, c, g, or t
  misc_feature (322)..(322): n is a, c, g, or t
  misc_feature (357)..(377): n is a, c, g, or t
  misc_feature (400)..(400): n is a, c, g, or t
  misc_feature (417)..(417): n is a, c, g, or t
  misc_feature (446)..(446): n is a, c, g, or t
  misc_feature (508)..(508): n is a, c, g, or t
  misc_feature (534)..(561): n is a, c, g, or t

SEQ ID NO: 2988 - DNA, 547 bp, Mus musculus
  misc_feature (162)..(162): n is a, c, g, or t
  misc_feature (228)..(228): n is a, c, g, or t
  misc_feature (239)..(239): n is a, c, g, or t
  misc_feature (446)..(446): n is a, c, g, or t
gggcccacacattcttaatctaaagataaggacttccccaggtgcttcagaagcaggtagaatcttaggtatttaccatcttgagtttaaaaaaagctagagtcttggaaaggtaaaagcagagaagatgacatattgctgggttgcatctttagacaacantaatgctggtggatctttggctgtaccctgaggctcaggcctggtgaagaaatggtttctgctacntggttcccaancccagtgcagcaaaggcaagaactgttgccacttgctgaagcaagatggaagtatttgtggacatggctgagcttcgactctgacttcagtgaccgcgccttcgctgctgttgaaggagcactgggaagtactcaagggagtagtgaaggctagacttcctaagtaaaacaagctgaaaacgacaactacctgccatctaagaaganagcctgctggccctcactcttgactcagctcctgtttccagtcagcatggagggatcgaggtgggaggtggggtgatggtgtctgctctgttctaagcgtt

SEQ ID NO: 2989 - DNA, 547 bp, Mus musculus; identical to SEQ ID NO: 2988
  misc_feature (162)..(162): n is a, c, g, or t
  misc_feature (228)..(228): n is a, c, g, or t
  misc_feature (239)..(239): n is a, c, g, or t
  misc_feature (446)..(446): n is a, c, g, or t

SEQ ID NO: 2990 - DNA, 403 bp, Mus musculus
  misc_feature (86)..(86): n is a, c, g, or t
  misc_feature (159)..(159): n is a, c, g, or t
tcgccttcaggttggaagggtttgaggcgagcacgaggggaacttgagtggaaacctaggagcatctggctgcatgcaccccgcantaaagctggccgtggcctgagaggcgtgggcagagctttcccatcagtctgacatcatcactgttcagcggtnggctttgtggatccagagagagaagcatgctacagagagtgagcgggaaagaagccggccaccagcatttggacttgagtcactctgcctgaggaagatctccaaacgtgaatgctaccggggacagtcagccgcgaatggcacgaggtacggctgagagggcgtggcttggtttttccttccacagtgcatcacccacagttccagtttgcattttctttttgaagtgccactctcacgggtc

SEQ ID NO: 2991 - DNA, 403 bp, Mus musculus; identical to SEQ ID NO: 2990
  misc_feature (86)..(86): n is a, c, g, or t
  misc_feature (159)..(159): n is a, c, g, or t

SEQ ID NO: 2992 - DNA, 398 bp, Mus musculus
  misc_feature (315)..(319): n is a, c, g, or t
  misc_feature (321)..(322): n is a, c, g, or t
  misc_feature (325)..(326): n is a, c, g, or t
  misc_feature (328)..(330): n is a, c, g, or t
  misc_feature (332)..(334): n is a, c, g, or t
  misc_feature (336)..(338): n is a, c, g, or t
  misc_feature (340)..(343): n is a, c, g, or t
  misc_feature (346)..(349): n is a, c, g, or t
  misc_feature (351)..(351): n is a, c, g, or t
  misc_feature (354)..(354): n is a, c, g, or t
  misc_feature (356)..(356): n is a, c, g, or t
  misc_feature (358)..(359): n is a, c, g, or t
  misc_feature (361)..(364): n is a, c, g, or t
  misc_feature (366)..(366): n is a, c, g, or t
  misc_feature (368)..(369): n is a, c, g, or t
atcacatctgacaggggccacgaggctcagagaggaagtcaggctgcccatgtagcatcctctgaaagttccagtgcacacacacacacactcacacacatgacgccacattgccacatagcacccgaagattgcccagagaggtgggctgtggtctgcaggctgtaatacttctctgtattcatgagccctgacattcataagctcccaacacaaaatcctgtcctgtggctgaagtctgccctacgactctattagatctggtagggtcaggctgtttgttccttgcatagacaatttcattgctttctccannnnncnnggnngnnntnnntnnntnnnnttnnnntntcntnanngnnnnangnnctctgaaagcatcagagatcttggctcac

SEQ ID NO: 2993 - DNA, 398 bp, Mus musculus; identical to SEQ ID NO: 2992
  misc_feature (315)..(319): n is a, c, g, or t
  misc_feature (321)..(322): n is a, c, g, or t
  misc_feature (325)..(326): n is a, c, g, or t
  misc_feature (328)..(330): n is a, c, g, or t
  misc_feature (332)..(334): n is a, c, g, or t
  misc_feature (336)..(338): n is a, c, g, or t
  misc_feature (340)..(343): n is a, c, g, or t
  misc_feature (346)..(349): n is a, c, g, or t
  misc_feature (351)..(351): n is a, c, g, or t
  misc_feature (354)..(354): n is a, c, g, or t
  misc_feature (356)..(356): n is a, c, g, or t
  misc_feature (358)..(359): n is a, c, g, or t
  misc_feature (361)..(364): n is a, c, g, or t
  misc_feature (366)..(366): n is a, c, g, or t
  misc_feature (368)..(369): n is a, c, g, or t

SEQ ID NO: 2994 - DNA, 557 bp, Mus musculus
  misc_feature (186)..(186): n is a, c, g, or t
  misc_feature (193)..(193): n is a, c, g, or t
  misc_feature (263)..(263): n is a, c, g, or t
  misc_feature (278)..(278): n is a, c, g, or t
  misc_feature (344)..(344): n is a, c, g, or t
  misc_feature (388)..(388): n is a, c, g, or t
  misc_feature (390)..(390): n is a, c, g, or t
  misc_feature (404)..(404): n is a, c, g, or t
  misc_feature (478)..(478): n is a, c, g, or t
  misc_feature (480)..(480): n is a, c, g, or t
  misc_feature (488)..(488): n is a, c, g, or t
  misc_feature (490)..(490): n is a, c, g, or t
  misc_feature (492)..(493): n is a, c, g, or t
cttttgctgttgattgagaagcacaatgttaatagagtacgtggtgatcaatatgttttatcttaaagaatgtaaaggtttgtaggttgcggaacgttattttggagaaatggggctcgcttgtcatagatattgtgtatttggccaacacactactcaacaataccttggatttgcacattggcnagtgtantcagtgggactcggaacgcccccaccagctcctaatgagctactccaatctccaaggccaaggattggtntgggtgacttgggtntcttaaaacaattatttacaggaaccaaatgccaaaaggaagaaataggtaagttctcccactttntccaagatgaagctttttaattattgctattaatattaaatagntntcattcatacagtntatgagtagatcatttgggcaattgtccacaaggaccaatttttaaaagatgttcctgtgttatggctgaatantntagtaatntntnntcctttattttcaatatttgatgaacattttggtgttgaaaacttagctgatagatgcttgtac

SEQ ID NO: 2995 - DNA, 557 bp, Mus musculus; identical to SEQ ID NO: 2994
  misc_feature (186)..(186): n is a, c, g, or t
  misc_feature (193)..(193): n is a, c, g, or t
  misc_feature (263)..(263): n is a, c, g, or t
  misc_feature (278)..(278): n is a, c, g, or t
  misc_feature (344)..(344): n is a, c, g, or t
  misc_feature (388)..(388): n is a, c, g, or t
  misc_feature (390)..(390): n is a, c, g, or t
  misc_feature (404)..(404): n is a, c, g, or t
  misc_feature (478)..(478): n is a, c, g, or t
  misc_feature (480)..(480): n is a, c, g, or t
  misc_feature (488)..(488): n is a, c, g, or t
  misc_feature (490)..(490): n is a, c, g, or t
  misc_feature (492)..(493): n is a, c, g, or t

SEQ ID NO: 2996 - DNA, 101 bp, Mus musculus
aagtctcccttggtttatgagtgagcaaagttgactaaggaatacactagtagattctcctgagacttttgtaaacattgtagaggcaactggccagtcaa

SEQ ID NO: 2997 - DNA, 101 bp, Mus musculus; identical to SEQ ID NO: 2996

SEQ ID NO: 2998 - DNA, 303 bp, Mus musculus
  misc_feature (27)..(42): n is a, c, g, or t
  misc_feature (116)..(116): n is a, c, g, or t
  misc_feature (156)..(172): n is a, c, g, or t
ttgcccagaatgtgtgaaaccactaannnnnnnnnnnnnnnntgttgggctgctggattggaagtggcaagacctaccatatatggcaatcaatcagcccatgatgcttggcgctnaactgccttccttggactagttaaaacgcgtaaggatgannnnnnnnnnnnnnnnnttcaaaggagtcatctcgtttgatagtgatagttactcaggagctccagtgcgcagtctcagacagtggatacagtcttagagacgagatgctgaccgtcctgctttgattgtgccccagggtctgcattg

SEQ ID NO: 2999 - DNA, 303 bp, Mus musculus; identical to SEQ ID NO: 2998
  misc_feature (27)..(42): n is a, c, g, or t
  misc_feature (116)..(116): n is a, c, g, or t
  misc_feature (156)..(172): n is a, c, g, or t

SEQ ID NO: 3000 - DNA, 556 bp, Mus musculus
  misc_feature (32)..(32): n is a, c, g, or t
  misc_feature (457)..(457): n is a, c, g, or t
  misc_feature (496)..(496): n is a, c, g, or t
attctgtaggctgtgtttccctggtgttttanggccctctggctccaaaaatgcttcctctcttcctcctgtgggattctcctggctcctcctagtggttggctgtgggtctttgtatccactcccatcagttgttagatgaagccactctgatgacagttatgctacatttcagtataacagattatcattaggaatgtgtgtgtgtgtgtgtgtgtgtgtgtgtgtgtgtgtgtgtgtgtgtgtgtgtgtgcgcgcgctaattctgtttggttctaccctgggtctctgggttgggctgcctctttcctgaccatctgttcagtgtcagtcatcggctgcctctggtggcctgggcctcaagttgaaccaatcattactcccacaagttctgtgccaacatgaccctagcacaccttgcaggcaggacagaattgtaggtcgaaagttttgtggntgggttgatgtccaagatccactactaagagccttgccnggttatagaaaatagccagattaggctccatatcccccattaccaggagacttccctagg

SEQ ID NO: 3001 - DNA, 556 bp, Mus musculus; identical to SEQ ID NO: 3000
  misc_feature (32)..(32): n is a, c, g, or t
  misc_feature (457)..(457): n is a, c, g, or t
  misc_feature (496)..(496): n is a, c, g, or t

SEQ ID NO: 3002 - DNA, 556 bp, Mus musculus; identical to SEQ ID NO: 3000
  misc_feature (32)..(32): n is a, c, g, or t
  misc_feature (457)..(457): n is a, c, g, or t
  misc_feature (496)..(496): n is a, c, g, or t

SEQ ID NO: 3003 - DNA, 559 bp, Mus musculus
  misc_feature (70)..(70): n is a, c, g, or t
  misc_feature (78)..(78): n is a, c, g, or t
  misc_feature (98)..(98): n is a, c, g, or t
  misc_feature (118)..(118): n is a, c, g, or t
  misc_feature (120)..(120): n is a, c, g, or t
  misc_feature (129)..(129): n is a, c, g, or t
  misc_feature (150)..(150): n is a, c, g, or t
  misc_feature (195)..(195): n is a, c, g, or t
  misc_feature (273)..(287): n is a, c, g, or t
  misc_feature (308)..(308): n is a, c, g, or t
  misc_feature (334)..(334): n is a, c, g, or t
  misc_feature (336)..(336): n is a, c, g, or t
  misc_feature (342)..(342): n is a, c, g, or t
  misc_feature (348)..(369): n is a, c, g, or t
  misc_feature (371)..(371): n is a, c, g, or t
tctaagacagcatggcttcactttcctgtgttatgagaaggtcacactttggaatactgaaggacaatcntgaagtgntgcagcgcatagtgaatgcntcttggtgttttcacgttcntntgtgaggantcatagacttacagaatgatnccgaatggaatgttttgtgcatgaccttttaacctttggctattnccaattccccactgcaaaggggaaggcagattttatgaagagttttaggaataaatacattttatagaatggaaaccnnnnnnnnnnnnnnngaagtttattcatgcttgcantcttgtttggaaataaaatgggtccntntggaanaaaaannnnnnnnnnnnnnnnnnnnnnantgtctggttccaactggaaccactgatcccttcctttctttgtatccaggtcacagccccaaatcttcttcccctagactaactgtaactataattttgtcacagacaggtggttctgtgaccttccagatgacactatgttcccctgcccaagtgaagccttctgtggatgggctatagagtcccat

SEQ ID NO: 3004 - DNA, 559 bp, Mus musculus; identical to SEQ ID NO: 3003
  misc_feature (70)..(70): n is a, c, g, or t
  misc_feature (78)..(78): n is a, c, g, or t
  misc_feature (98)..(98): n is a, c, g, or t
  misc_feature (118)..(118): n is a, c, g, or t
  misc_feature (120)..(120): n is a, c, g, or t
  misc_feature (129)..(129): n is a, c, g, or t
  misc_feature (150)..(150): n is a, c, g, or t
  misc_feature (195)..(195): n is a, c, g, or t
  misc_feature (273)..(287): n is a, c, g, or t
  misc_feature (308)..(308): n is a, c, g, or t
  misc_feature (334)..(334): n is a, c, g, or t
  misc_feature (336)..(336): n is a, c, g, or t
  misc_feature (342)..(342): n is a, c, g, or t
  misc_feature (348)..(369): n is a, c, g, or t
  misc_feature (371)..(371): n is a, c, g, or t

SEQ ID NO: 3005 - DNA, 503 bp, Mus musculus
  misc_feature (93)..(130): n is a, c, g, or t
  misc_feature (133)..(148): n is a, c, g, or t
  misc_feature (409)..(409): n is a, c, g, or t
tttgcaggtacagctgcctcccaaccaaggcctggaggcgttaagaggtgggagggcacaagcaggctttcaggagtgttgaagcaagggatnnnnnnnnnnnnnnnnnnnnnnnnnnnnnnnnnnnnnnagnnnnnnnnnnnnnnnnagaggtcttaaaagccctgcattcaccatgatctgtctgcccctgcccttttgggttcttctgcatgcagtgcccccctctcctgatgctaagttttggcatgggtgtcctggctacctcaactgtattctcaaggccaggaggatggctctggccatacttacggaagccaggccaatttgtgtgaagcaagctgggcttctggtttgattcagcttctgtagcctccagggaccatcctctggagtcttgtgctttcantggactcttcagcttcaccaaacacaccaagctttgccatttacatgccatgtgggccttgccaagggttatttcaggggtcttcctgggagtc

SEQ ID NO: 3006 - DNA, 503 bp, Mus musculus; identical to SEQ ID NO: 3005
  misc_feature (93)..(130): n is a, c, g, or t
  misc_feature (133)..(148): n is a, c, g, or t
  misc_feature (409)..(409): n is a, c, g, or t

SEQ ID NO: 3007 - DNA, 360 bp, Mus musculus
  misc_feature (26)..(26): n is a, c, g, or t
  misc_feature (183)..(183): n is a, c, g, or t
actcagctaagtcaaaggagatcttnacatggctctgggctccaagattatagatctctgtaggcttgacttcattgatgattttcactaggcaggtgctgtcagtgaggtcaccatagtgcaacttcatgtttccttcaatatgagcctgaggattcttatataaatgttcaattcgacctntattaaatgaactagatcgccgtactattccatggacctcgtaccctttctccaacaggaattctgccaagtacgaaccatcctgtccggtgatgccagtgatgagagccaccttcctgagcttgcccatctcgccatccccggagcccgggtagctcgggcacttagcgggagctt

SEQ ID NO: 3008 - DNA, 360 bp, Mus musculus; identical to SEQ ID NO: 3007
  misc_feature (26)..(26): n is a, c, g, or t
  misc_feature (183)..(183): n is a, c, g, or t

SEQ ID NO: 3009 - DNA, 442 bp, Mus musculus
  misc_feature (388)..(388): n is a, c, g, or t
  misc_feature (407)..(407): n is a, c, g, or t
atccttggtgcaggttcaggttgaggttggaccaataggaattggacaggaagttgttgtacacggccttcatctgctccaggctatcagacacgatggtgtcctccaggggcacctggacctccttggtctcctcctcattcttgatggaactgctttcaaagtcagccatccggtcactcgtctcactgatgtgagactcgctgtccatttcatggctggagaactcagcggccggtgagttctggtagctagggcaggccttgctgagttccttctctggacacatgtacttggctgagggctctccatctgccgcttgttcctccggctctacgtcatcttctaccaaggcagctgcctttaactcatcggaaacataggctgntgcgcgccggggcgcctgntgcttcctcctcggcatgatgcttctcccgcgact

SEQ ID NO: 3010 - DNA, 442 bp, Mus musculus; identical to SEQ ID NO: 3009
  misc_feature (388)..(388): n is a, c, g, or t
  misc_feature (407)..(407): n is a, c, g, or t

SEQ ID NO: 3011 - DNA, 233 bp, Mus musculus
  misc_feature (137)..(137): n is a, c, g, or t
  misc_feature (208)..(208): n is a, c, g, or t
aggtctctggtggtctggaaacaacttcctataaactctgcctcagcagcagctgtgggctgacacagccacatggggtgggggagagaagacccaaaatgagctttccactccagggctggctgcaagcgtttcanattctaccagcgtctccctgggaaggagacttaagtccttgtcatgaagcctccagccttcctcacagtanagttgctgcccatcgtggattcaca

SEQ ID NO: 3012 - DNA, 233 bp, Mus musculus; identical to SEQ ID NO: 3011
  misc_feature (137)..(137): n is a, c, g, or t
  misc_feature (208)..(208): n is a, c, g, or t

SEQ ID NO: 3013 - DNA, 386 bp, Mus musculus
  misc_feature (67)..(67): n is a, c, g, or t
taggcacacagctgttaacatctggatccaggatcatgtctgctaacaagggctggtgggtgccacntgagggtgaggacaacctgtccaagaagttcctaaggaagaccagggagtctccactggtgcctataggtgtagcaggctgcctggtgatagcagcatacaggatttaccggctgaaggctcggggttctaccaagctctccatccatctgattcacaccagagtggcggcacaggcgtgtgctgtgggggccatcatgcttggtgccatgtatacaatgtacagagattacatcaagagggtgtcagaggatgccgagaagtaggactccagaggtggcaggatggcccagtcccccggctgtctgcatgttctaata

SEQ ID NO: 3014 - DNA, 386 bp, Mus musculus; identical to SEQ ID NO: 3013
  misc_feature (67)..(67): n is a, c, g, or t

SEQ ID NO: 3015 - DNA, 562 bp, Mus musculus
  misc_feature (151)..(151): n is a, c, g, or t
  misc_feature (255)..(255): n is a, c, g, or t
gctggttaatcctggcgtcccaggctccgcagggcgcctgcgcggtctcggcgcatgagcagtccgtgtaggcgaggtttttattccttgtgacctggtgtttctggaaggcctctgggtgatacctctcagatgtggtctgggctctgcnagcctgatgactaaaggcaaccctaaggcgcttagtccagcagccctgggaaccacaagggagtcacacacctttggggacaagcctagtggcaggttgcctgngagtgaccttccccacctctggccgttgcaggctcctataattaggtcattcgtgggcgaaggaaggtgtacctgctgggatgtgtcgcccgcgcaccttacacccccagcacacacctgtccctgcacgaaggcggggccgaagtgggccttcgatcctggcctcttcctaagccttgcttcctctcctgtggccttcaacacctctggtgtgcacttttctccgagacctgtgcccactggaaataatcttgtcctacattctagaggaacaagccagggctgtgttctggtactggtagaagca

SEQ ID NO: 3016 - DNA, 562 bp, Mus musculus; identical to SEQ ID NO: 3015
  misc_feature (151)..(151): n is a, c, g, or t
  misc_feature (255)..(255): n is a, c, g, or t

SEQ ID NO: 3017 - DNA, 201 bp, Mus musculus
gactgggtttcacacacctgcatacctcaccctgataggtgagaacacagctcgctgctgtcccagggatataatttaccagggaggaaggctatgacctgctctcagtgaaccagacacttgtttcatatgcatggtggcctgtggggtgcttcctcagtctagagtaaccagaggtgctgaaccatagcctaacccata

SEQ ID NO: 3018 - DNA, 201 bp, Mus musculus; identical to SEQ ID NO: 3017

SEQ ID NO: 3019 - DNA, 588 bp, Mus musculus
  misc_feature (96)..(97): n is a, c, g, or t
  misc_feature (221)..(222): n is a, c, g, or t
  misc_feature (563)..(563): n is a, c, g, or t
ctctgtagctgaagtatgtcctatccattactcttcaatgctttggtggacttgcttactcgggtcaggtgataatcaggggaaaaaaaaaaaaannaagcgtgtgtttttcattctccgaaccacaccgaggatatgggagaccgcaaactaaagtggcacctctggtcaaagtggcggagtgacagctctacttccaagtagaaggctgcccctccggnnagatttaaggtccatcgtcctagtttactggaagcaaactggtttggtttggttttcccctttctacacaggacttatatgaccctctgagtaagcagtggactggtaattgagcggtagacttgatacttgttttcagtgtcaaccaaataaacagctatctggtagcagacggcagtgtttttgaaattaggcttcccatgtcgcctgtttaacctcctcccccacccccaccccccaaaatctgttttcctcagtccctcgttctctctctgtgttattgcctgcctgagtcaattatagtcacttataccaggtaggcgttgaatcaagtgaatatntggcaaaaacacacagtgtgactgc

SEQ ID NO: 3020 - DNA, 588 bp, Mus musculus; identical to SEQ ID NO: 3019
  misc_feature (96)..(97): n is a, c, g, or t
  misc_feature (221)..(222): n is a, c, g, or t
  misc_feature (563)..(563): n is a, c, g, or t

SEQ ID NO: 3021 - DNA, 292 bp, Mus musculus
  misc_feature (70)..(70): n is a, c, g, or t
  misc_feature (76)..(76): n is a, c, g, or t
  misc_feature (123)..(123): n is a, c, g, or t
cagagtgctctaagccttgtcactgtaaggtatttttataaagctgacttcaggtctgtggtggttagtntccatntcaagaaacctctctggaaccactttaataacaactgaaaaggcatntcggctttgcttttagtgatgtgcttttggtgaaaaaacaaattgatgaaagtcaatttcagtaggtaaaagattttatttgtttctatctcccttgatcctctggagaattgtgtgattataaatctctccctgctcaatccaatatcagtatcaaggaacccagatt

SEQ ID NO: 3022 - DNA, 292 bp, Mus musculus; identical to SEQ ID NO: 3021
  misc_feature (70)..(70): n is a, c, g, or t
  misc_feature (76)..(76): n is a, c, g, or t
  misc_feature (123)..(123): n is a, c, g, or t

SEQ ID NO: 3023 - DNA, 447 bp, Mus musculus
tatgaagtccattgaaggcccaaactagaagtcacttgcaaccgtctcgtccctgcattctggggaccagatccaggtctgtttgacaaaacaaccaactaactacaaccggtttaaatgaattacagttgggccgggcacgttccgggaaggcagaacgaccctgtccttagcgttgtcagctggggctctaacccccaagaatcaggaaaaccaagcaagggggtccccaaagtcttgccctcggccgagcctgaaagactatgccgtccatcccgagatcaaagaggaaaacacgggggggatgagcggaggcagggagggacgccatcaaccaaggaacccgaccacatcccactattttcggcccgagacaagcgaccgaaagcaaaccgtcaccacctcagccccttcaagccccaacgcggcgagccagccttttgggtc

SEQ ID NO: 3024 - DNA, 447 bp, Mus musculus; identical to SEQ ID NO: 3023

SEQ ID NO: 3025 - DNA, 427 bp, Mus musculus
cagctctttgtgagatggctctaagacaagttaggtcatgtggaacagagtggtcagcgttggggatgagcacagtcacccagctgtgctctccactgtctaccagctctgactagtgatcttccaggtgcatgacacctgcagcccccagctgcttgcttcagacctgcaacctccccaggccccatctttggcatgtcacaatcctggagcagcagttcctgtgaaggctccttagctgaagggtcctgtgctctaggctttccacctcaaaccttttatagaaaaggacttgggggattgttctttttgagggtccttttgttttcctttgcttttcttttggccttccctctgtctttcacttagaccagctatttgaaagggcagacgatgctaaaggtgtactgtgcagcttgtttagacg

SEQ ID NO: 3026 - DNA, 427 bp, Mus musculus; identical to SEQ ID NO: 3025

SEQ ID NO: 3027 - DNA, 298 bp, Mus musculus
  misc_feature (29)..(29): n is a, c, g, or t
  misc_feature (32)..(33): n is a, c, g, or t
  misc_feature (36)..(42): n is a, c, g, or t
  misc_feature (44)..(46): n is a, c, g, or t
  misc_feature (48)..(57): n is a, c, g, or t
  misc_feature (59)..(69): n is a, c, g, or t
  misc_feature (72)..(77): n is a, c, g, or t
  misc_feature (79)..(79): n is a, c, g, or t
ggcagtgactctagccttgggcctacagncannctnnnnnnngnnntnnnnnnnnnncnnnnnnnnnnngcnnnnnngnctctgtgctctagtgctctgggtcccccacgcctgcaatagagcctgccttttctcacatagtctttccctgactggactgtgggtgcctgactccaaacttgaggttccactcctagggttcagaggaaccaagggtccccctacccttctgggtatcgtgctgtctgagcctgtgttgtgccccagccacgcttggggctgccagaaagacagagaa

SEQ ID NO: 3028 - DNA, 298 bp, Mus musculus; identical to SEQ ID NO: 3027
  misc_feature (29)..(29): n is a, c, g, or t
  misc_feature (32)..(33): n is a, c, g, or t
  misc_feature (36)..(42): n is a, c, g, or t
  misc_feature (44)..(46): n is a, c, g, or t
  misc_feature (48)..(57): n is a, c, g, or t
  misc_feature (59)..(69): n is a, c, g, or t
  misc_feature (72)..(77): n is a, c, g, or t
  misc_feature (79)..(79): n is a, c, g, or t

SEQ ID NO: 3029 - DNA, 531 bp, Mus musculus
  misc_feature (235)..(235): n is a, c, g, or t
gaggtataccatctccagatcctaactgcttatagaatctgtattccaaatgcagctgtggtgctctggatttcatgggctccagtttaatcgccacatattcatttgtgtataaatttttccctaatcgtaattctccaaaattgccacatccgatttttttcccaactctaaagttaggtccaaccattaaaactccagatgaagaagacccagttcctcgagtgctgtgccntgaccgaccactgggccgtgccattctatcatctgatttgtccttgtctttctttttattatccatatcaagtttgcggtactccactttgaattctttaatcaagacaagcacgatgaaatggggtactgtaagagcaggtgcatcactaggtagcagtaccctatgagcaacgctagcactcaaacgtcagcggatagtcagtcaagtgacgcctgttcatcccattcgtacagcttctcagttgtcttctcagcaaagtatgtcttcaaaattatcttctcagtgatgtaagc

SEQ ID NO: 3030 - DNA, 531 bp, Mus musculus; identical to SEQ ID NO: 3029
  misc_feature (235)..(235): n is a, c, g, or t

SEQ ID NO: 3031 - DNA, 357 bp, Mus musculus
ctgcttcaggcaatagaaaaagttaatttacaagtatactacagtgccacaataccataacaagtacatataaaatcagattaaggaaaaagataatttccacaagataaggaatcctgtggggttatgttattcgtgaaggagccagagtgagccgcccgtcgcatttgtactttaagaggcgtcctgatactcactttgattctcacaagcaccccgcacgcacgcaaggtgtcattaacttcgctttacaggtgctgaggtcgcaccacggtcagggatgccagaccctggtggagccaggtggcgagctgcctccctgccaccccctcgcttggctcttcctggtcctcacta

SEQ ID NO: 3032 - DNA, 357 bp, Mus musculus; identical to SEQ ID NO: 3031

SEQ ID NO: 3033 - DNA, 406 bp, Mus musculus
  misc_feature (193)..(193): n is a, c, g, or t
  misc_feature (307)..(307): n is a, c, g, or t
  misc_feature (376)..(376): n is a, c, g, or t
ttcatgccacccaagtgtcatcctggtcttggttctttgtcacctttgatttcttctgtgcttttctgagtaagtctttgatttctaggccttgactctccactcttcataaaggctccaacacctgtaacctcctggttacagttgctgtaggagacctgaccttccatctcctcagctcctcagactgacnaagctgctatttttatgcacaggatgctggcacgacaagctcagttggcacaaatgcaagcccttcctagttctctttccatagcttctgtctctagagaaccttgttataatnctctgccagtccctcccattgtccctccatcagcccaccttagtacttggaaattaacccaaggcctgnatcatgcttaatcaagtctttaccacgtag

SEQ ID NO: 3034 - DNA, 406 bp, Mus musculus; identical to SEQ ID NO: 3033
  misc_feature (193)..(193): n is a, c, g, or t
  misc_feature (307)..(307): n is a, c, g, or t
  misc_feature (376)..(376): n is a, c, g, or t

SEQ ID NO: 3035 - DNA, 426 bp, Mus musculus
  misc_feature (54)..(54): n is a, c, g, or t
cactgcagaggatgggtctagagattgcccgaggactggcacacctgcactctnacaactatgtgcacagcgatctggcgctgcgcaactgcctgctaacttcagacctgactgtgcgtattggagactatgggctggcgcacagcaactacaaggaagactactacctgacacccgagcgcctatgggtgccgctgcgctgggcagcgcccgagctgctgggcgagctgcacggcagcttcgtgctggtagatcaaagccgggagagtaatgtctggtccctgggggtgacactctgggagctattcgagttcggggcacagccctatcgtcacctatcggatgaggaggtcctggcctttgttgtccgccagcagcacgtgaagctggcccggcccaggctcaagctgccctacgctgactatt

SEQ ID NO: 3036 - DNA, 426 bp, Mus musculus; identical to SEQ ID NO: 3035
  misc_feature (54)..(54): n is a, c, g, or t

SEQ ID NO: 3037 - DNA, 550 bp, Mus musculus
  misc_feature (188)..(188): n is a, c, g, or t
  misc_feature (303)..(303): n is a, c, g, or t
  misc_feature (307)..(307): n is a, c, g, or t
  misc_feature (309)..(309): n is a, c, g, or t
  misc_feature (360)..(360): n is a, c, g, or t
  misc_feature (364)..(365): n is a, c, g, or t
  misc_feature (477)..(477): n is a, c, g, or t
  misc_feature (520)..(520): n is a, c, g, or t
tgactttcgggcaaggctgagacaggggcatatttatattaagctttgcctttctctcgaaccatgattggctctaaaactaaaaggaaagctagagaagagtctggggcttcctcaaaacctggaaccaatagccctgccaatgctaaaggaaaagccaagaatcagaccactaaagccgttaaggnagaaccaaaagaagaatgggggaaccaggctgaggctagggatgaagcagtggccaggacacagccagccatttccactgagcccaagactgtgacctggaaagtaaaaaaaaanaaananaagactaatgctagagtcatggctcaggctaagacagaactcccggcagcnctgnntttagtgcctcacaccaagtcagatgctctgcctacatctgtggtcattactgtaaccaagtctgaagtcaagattgacactggaattgaggcatctctcaagggcgctgcnaaggctactgataagcgcagtattaagcagaagcctgagatanagaaagaggtctgtgtcaaatccagggctg

SEQ ID NO: 3038 - DNA, 550 bp, Mus musculus; identical to SEQ ID NO: 3037
  misc_feature (188)..(188): n is a, c, g, or t
  misc_feature (303)..(303): n is a, c, g, or t
  misc_feature (307)..(307): n is a, c, g, or t
  misc_feature (309)..(309): n is a, c, g, or t
  misc_feature (360)..(360): n is a, c, g, or t
  misc_feature (364)..(365): n is a, c, g, or t
  misc_feature (477)..(477): n is a, c, g, or t
  misc_feature (520)..(520): n is a, c, g, or t

SEQ ID NO: 3039 - DNA, 545 bp, Mus musculus
  misc_feature (65)..(65): n is a, c, g, or t
  misc_feature (138)..(138): n is a, c, g, or t
  misc_feature (144)..(144): n is a, c, g, or t
  misc_feature (154)..(154): n is a, c, g, or t
  misc_feature (183)..(183): n is a, c, g, or t
  misc_feature (190)..(205): n is a, c, g, or t
  misc_feature (285)..(285): n is a, c, g, or t
  misc_feature (350)..(350): n is a, c, g, or t
  misc_feature (459)..(459): n is a, c, g, or t
gggaagcctttctgccgccctggaccacaggtctggagacgcacacggaacaccgggtgtggcanatcacatggaacacaggacagcgcgcaacacacgggcacacagacatgtggaagccaagcacacgctggtggntccccntccccctggnaagcctcgaaggaagaagcttgtggcaanttgggcnnnnnnnnnnnnnnnngttgacatgaggaaaatgaaaatcaaagatctaataatacagaacaaacttgattaaaactggtgcttaacatttgattnttacccacaatcccacagtctccgtgtaaaccactcaactcatcttgtagctttttttttttttnaaacgaaaacaaaaccattttctatggctctggcctgccttgtgaaccttagtggggtgctgtgggggttcacagcttagtgagggacagagttggaagaaagtttaancgaaaaaaaaaaaaaaaaaaaaaaaaaaactggacagaacagaaatgtgagcctgggaatcagctggagcttctcgacgccaccgg

SEQ ID NO: 3040 - DNA, 545 bp, Mus musculus; identical to SEQ ID NO: 3039
  misc_feature (65)..(65): n is a, c, g, or t
  misc_feature (138)..(138): n is a, c, g, or t
  misc_feature (144)..(144): n is a, c, g, or t
  misc_feature (154)..(154): n is a, c, g, or t
  misc_feature (183)..(183): n is a, c, g, or t
  misc_feature (190)..(205): n is a, c, g, or t
  misc_feature (285)..(285): n is a, c, g, or t
  misc_feature (350)..(350): n is a, c, g, or t
  misc_feature (459)..(459): n is a, c, g, or t

SEQ ID NO: 3041 - DNA, 468 bp, Mus musculus
  misc_feature (215)..(215): n is a, c, g, or t
  misc_feature (218)..(218): n is a, c, g, or t
  misc_feature (245)..(245): n is a, c, g, or t
  misc_feature (264)..(264): n is a, c, g, or t
  misc_feature (268)..(268): n is a, c, g, or t
  misc_feature (277)..(277): n is a, c, g, or t
  misc_feature (293)..(332): n is a, c, g, or t
  misc_feature (338)..(352): n is a, c, g, or t
  misc_feature (438)..(438): n is a, c, g, or t
  misc_feature (443)..(443): n is a, c, g, or t
acaggcctagcaaggccctgacagccacatcgactgaagattgtcaaggcgatagaaaaccactgccagaaagacctgtaagaagggatttgttctatacgaggcaactgcagtgagtgcttttaaggctatccctgtcgcacgttggatcctggataagctagtcccttcgtttgcgttgagaattggcatgcagtgtgtgtgagccgagggcntcntcagtgttccacaagcttcaggtcatnaggtcggtccaactgaagncatnaaaatcaantgttccctggagtttnnnnnnnnnnnnnnnnnnnnnnnnnnnnnnnnnnnnnnnntgtgtnnnnnnnnnnnnnnnaattataagtaactgtaatcggtagggagacatgttttaacctggatatgttagaaaagtatcacgtgccacctgggaagaagttnttttntggcaactgtcacactcacacatga

SEQ ID NO: 3042 - DNA, 468 bp, Mus musculus; identical to SEQ ID NO: 3041
  misc_feature (215)..(215): n is a, c, g, or t
  misc_feature (218)..(218): n is a, c, g, or t
  misc_feature (245)..(245): n is a, c, g, or t
  misc_feature (264)..(264): n is a, c, g, or t
  misc_feature (268)..(268): n is a, c, g, or t
  misc_feature (277)..(277): n is a, c, g, or t
  misc_feature (293)..(332): n is a, c, g, or t
  misc_feature (338)..(352): n is a, c, g, or t
  misc_feature (438)..(438): n is a, c, g, or t
  misc_feature (443)..(443): n is a, c, g, or t

SEQ ID NO: 3043 - DNA, 551 bp, Mus musculus
  misc_feature (108)..(141): n is a, c, g, or t
  misc_feature (170)..(170): n is a, c, g, or t
  misc_feature (225)..(225): n is a, c, g, or t
attgccagctcctgccaaattaagtacttcctcttaagaaacccctgcaggctcccactagatcacactgaacgctggcttctgtttgaggctgaagtcccagatcannnnnnnnnnnnnnnnnnnnnnnnnnnnnnnnnntgtcttcgctgcccaaactagtagactcnccgtgtgcggctgagaggctggggcagctcagccaagagcacagatcccacttangataccattgctttgttgctggcctgctgctcttaaacactggcctatctactgcaaatatgcctctgagaatagtacagaaaacatctggagataaccaacacagctcagcaaaactgaagaggtctacaaatttgcttcctgcttgcttttgttgatgtcggaattgctgaggattgtctgagtaggagccagggacttaggtttttgattcatcatagccctagttagaaataaacagacacacagattaattatcattagaggcagactttggagggagcaggtagtaggatacaggagaagtagactgcagccattttcaa

SEQ ID NO: 3044 - DNA, 551 bp, Mus musculus; identical to SEQ ID NO: 3043
  misc_feature (108)..(141): n is a, c, g, or t
  misc_feature (170)..(170): n is a, c, g, or t
  misc_feature (225)..(225): n is a, c, g, or t

SEQ ID NO: 3045 - DNA, 323 bp, Mus musculus
  misc_feature (248)..(249): n is a, c, g, or t
  misc_feature (252)..(252): n is a, c, g, or t
  misc_feature (254)..(255): n is a, c, g, or t
  misc_feature (257)..(257): n is a, c, g, or t
  misc_feature (260)..(261): n is a, c, g, or t
  misc_feature (265)..(265): n is a, c, g, or t
  misc_feature (270)..(270): n is a, c, g, or t
  misc_feature (272)..(272): n is a, c, g, or t
  misc_feature (276)..(276): n is a, c, g, or t
  misc_feature (278)..(279): n is a, c, g, or t
  misc_feature (285)..(285): n is a, c, g, or t
  misc_feature (288)..(288): n is a, c, g, or t
  misc_feature (296)..(296): n is a, c, g, or t
acgagtctctgaggacacagtgcctgggtcctgcgttctctcctgttccccacagctttctgtgaagtaacaagcgtgcgagcccacagaacactagcactgaactaaccagggagccattggacaaactgagacacatgggacaggccagcacacaggggacaggccagctaaccagacagcactgcttgtgagaagaactgctcctaaggtctcccagttaccataaccttgtttgctccagcctnnaantnnanganncttntcatntntggngnncctgancgnccaccgcngccaccgggccctagcaacttggtcag

SEQ ID NO: 3046 - DNA, 323 bp, Mus musculus; identical to SEQ ID NO: 3045
  misc_feature (248)..(249): n is a, c, g, or t
  misc_feature (252)..(252): n is a, c, g, or t
  misc_feature (254)..(255): n is a, c, g, or t
  misc_feature (257)..(257): n is a, c, g, or t
  misc_feature (260)..(261): n is a, c, g, or t
  misc_feature (265)..(265): n is a, c, g, or t
  misc_feature (270)..(270): n is a, c, g, or t
  misc_feature (272)..(272): n is a, c, g, or t
  misc_feature (276)..(276): n is a, c, g, or t
  misc_feature (278)..(279): n is a, c, g, or t
  misc_feature (285)..(285): n is a, c, g, or t
  misc_feature (288)..(288): n is a, c, g, or t
  misc_feature (296)..(296): n is a, c, g, or t

SEQ ID NO: 3047 - DNA, 479 bp, Mus musculus
  misc_feature (26)..(27): n is a, c, g, or t
  misc_feature (30)..(30): n is a, c, g, or t
  misc_feature (32)..(32): n is a, c, g, or t
  misc_feature (34)..(35): n is a, c, g, or t
  misc_feature (37)..(37): n is a, c, g, or t
  misc_feature (58)..(58): n is a, c, g, or t
  misc_feature (222)..(276): n is a, c, g, or t
  misc_feature (293)..(293): n is a, c, g, or t
  misc_feature (295)..(295): n is a, c, g, or t
  misc_feature (419)..(433): n is a, c, g, or t
agctgctttcaaagcaacctgtgatnnttntntnntntttttgagtttgaccatttangtacttgggctttgggctcctcacctgtgaattgtagatttctattttgcgggttttaacccaatacccttgtcactggctggcatcagcaagcttcggcctttttgcttccttctgtgttttgctctttggtggtccttccatagctaggacagacacggagnnnnnnnnnnnnnnnnnnnnnnnnnnnnnnnnnnnnnnnnnnnnnnnnnnnnnnnagctacggcagccagtngnatgcccgactctccgcccgatgtctctgcggatttcaagcttatgctgttgtgtcagtttcctgtctgcatctgtgataaatctctaaatatcctgtaattaaattaatttctagtgacagtgnnnnnnnnnnnnnnnaatcccccaagaggtaattatttccctgtttttagctgcagattaa

SEQ ID NO: 3048 - DNA, 479 bp, Mus musculus; identical to SEQ ID NO: 3047
  misc_feature (26)..(27): n is a, c, g, or t
  misc_feature (30)..(30): n is a, c, g, or t
  misc_feature (32)..(32): n is a, c, g, or t
  misc_feature (34)..(35): n is a, c, g, or t
  misc_feature (37)..(37): n is a, c, g, or t
  misc_feature (58)..(58): n is a, c, g, or t
  misc_feature (222)..(276): n is a, c, g, or t
  misc_feature (293)..(293): n is a, c, g, or t
  misc_feature (295)..(295): n is a, c, g, or t
  misc_feature (419)..(433): n is a, c, g, or t

SEQ ID NO: 3049 - DNA, 522 bp, Mus musculus
  misc_feature (263)..(263): n is a, c, g, or t
gaataaatgcatacacctgtttgtcaaaacatctttgctttttgtgcaactgcattttattaataatacatttaaaaaaagaagaggaagaaggaaaagaaaatagtatctttgagggaaaaaagtctactgtctgtaatggctttgcagttaatgctgcgtgtgtacttcattttattgcccttgatttacaaacattggatgacatgttgataatgggaagaaagaaaaactccacacacacatctctttctttccctccncctcctctctctctcaaattgtaacatagttgacaaaatgtgtttcctatcctcattatttggaacattttgtacaggtttgtggaatgggggtgagagagtgagtgtgtgagtgagtgtgtgttactgtttttgatacattcctagtccttgtgttttatcataccactgcctccttgactatcttaagttcctaagtttgaaaataggaaataaaaaagttgtttaaaaaaaaaatgtctcctttgcgcgtcatatt

SEQ ID NO: 3050 - DNA, 522 bp, Mus musculus; identical to SEQ ID NO: 3049
  misc_feature (263)..(263): n is a, c, g, or t

SEQ ID NO: 3051 - DNA, 489 bp, Mus musculus
  misc_feature (104)..(120): n is a, c, g, or t
tgtcattgcctggacaatcacggaaattatccgttactccttttacacattcagtctattaaaccatctgccttatatcatcaaatgggccaggtacacacttnnnnnnnnnnnnnnnnnaatgggagtgacaggagagctcctcacaatatacgcagctctgccctttgtccggcaggccggcctgtactccatcagcttacctaacaaatacaacttctcctttgattaccatgcattcctgattctgatcatgatctcctacattccactgttcccccagttgtacttccacatgatacaccagagaagaaaggtcctttctcacaccgaagaacataagaagtttgagtagcgctccacaccaccccaaaccagacttttcaatgatcaaaatatgctgcagactttttgagttcccagtaagaactatttttaaaatattaaatataaaacaaaataaaaaaccaaaatccagtgtcacacagg

SEQ ID NO: 3052 - DNA, 489 bp, Mus musculus; identical to SEQ ID NO: 3051
  misc_feature (104)..(120): n is a, c, g, or t

SEQ ID NO: 3053 - DNA, 232 bp, Mus musculus
  misc_feature (68)..(68): n is a, c, g, or t
  misc_feature (106)..(146): n is a, c, g, or t
ctctctggacttctacaaggaagccaaacagctgcctcccttttccctggggagaggtaggaaggaancagtcccttccttccttatgtttggaagggtaggtaannnnnnnnnnnnnnnnnnnnnnnnnnnnnnnnnnnnnnnnntagggtaaataggcaacattgcccctaagcctggatcctaaagatggttctagccatgcccttcctgtacgtgctcccgagaacca

SEQ ID NO: 3054 - DNA, 232 bp, Mus musculus; identical to SEQ ID NO: 3053
  misc_feature (68)..(68): n is a, c, g, or t
  misc_feature (106)..(146): n is a, c, g, or t

SEQ ID NO: 3055 - DNA, 332 bp, Mus musculus
  misc_feature (104)..(134): n is a, c, g, or t
  misc_feature (197)..(240): n is a, c, g, or t
  misc_feature (242)..(244): n is a, c, g, or t
  misc_feature (263)..(263): n is a, c, g, or t
  misc_feature (307)..(307): n is a, c, g, or t
gaggcagatccttcgagcatccgtggagctcctggatgagatgaagttctccttggagaagctacatcaaggaattactgtcccggatcctcccctggacactnnnnnnnnnnnnnnnnnnnnnnnnnnnnnnngactcctgattgaaaagccacacccctaaacggacagaaggacacatggaaccctggcagtcnnnnnnnnnnnnnnnnnnnnnnnnnnnnnnnnnnnnnnnnnnnncnnnactgtggccctgccaaganccacacagacctggggaccatagaaccaagatgcactttagatntgtgtgagcgattccagctgccact

SEQ ID NO: 3056 - DNA, 332 bp, Mus musculus; identical to SEQ ID NO: 3055
  misc_feature (104)..(134): n is a, c, g, or t
  misc_feature (197)..(240): n is a, c, g, or t
  misc_feature (242)..(244): n is a, c, g, or t
  misc_feature (263)..(263): n is a, c, g, or t
  misc_feature (307)..(307): n is a, c, g, or t

SEQ ID NO: 3057 - DNA, 429 bp, Mus musculus
  misc_feature (324)..(324): n is a, c, g, or t
gttcaaccttaaatgcatgactctgtatattatgtatagaagacaatgttttttaatttataaagttcagccttcattaatcgcatgggtttttctgcagctttttgtgaatactattgttttgtgtaatagaaacatttgtatatatttaatatcaaaatatccatgtggatagtaaaagtacttcattggacctactgtggatatttgtaggagtctttatctacaaataaagcaacagatagttttgtatttagttaaaacatgagtttattttctcaaatgtccagaataattaaaattattggaaccagcaaatgttanataccactgccttttttcttatggtttggaagaggatcccagccactagaaaatgtgcctccctcatatttcttcttaatggagagttaccctggatattttcat

SEQ ID NO: 3058 - DNA, 429 bp, Mus musculus; identical to SEQ ID NO: 3057
  misc_feature (324)..(324): n is a, c, g, or t

SEQ ID NO: 3059 - DNA, 402 bp, Mus musculus
  misc_feature (157)..(157): n is a, c, g, or t
  misc_feature (362)..(377): n is a, c, g, or t
agcctgagggcaaggctataatagatgaatttgagcagaagcttcgtgcctgtcacaccagaggcatggatggaatagaggagtttgaaactggccagggaggcagccagcgagccctgtctgccaagaaaccctccgctgtctcaaggctacagcntctgacttctgtagactcagacaatgactttgtcacacctaagccgcgacgtaccaaacctggtcgtccacaaactcagcagcgcaagaagtcccagaggaaagccaaagttgtcttcttgagtgacgagtccagtgaggacgaactttcagcagagatgacagaagaagagacacccaagagaaccacccccatccgcagagcnnnnnnnnnnnnnnnnaggtcctaggagctgcctttgccta

SEQ ID NO: 3060 - DNA, 402 bp, Mus musculus; identical to SEQ ID NO: 3059
  misc_feature (157)..(157): n is a, c, g, or t
  misc_feature (362)..(377): n is a, c, g, or t

SEQ ID NO: 3061 - DNA, 280 bp, Mus musculus
  misc_feature (77)..(77): n is a, c, g, or t
ttgaagccatggtgaggtcaggaacggagaagctgtcctgccgaaacccgctctcccacctcaaaacgaagggcgcntcagccttgcagcggccggcatcttccacacagggagcaggctcagcctcaccaagggctctcagtctgctcagatctgctggtctctgctctgcttctgttcttgctctgaactaggtgaagcctgaggtccgttctttaaaacagtccaacaggagaacagggtcttgtactacaaatgtagagtcagacgtgctgccgca

SEQ ID NO: 3062 - DNA, 280 bp, Mus musculus; identical to SEQ ID NO: 3061
  misc_feature (77)..(77): n is a, c, g, or t

SEQ ID NO: 3063 - DNA, 448 bp, Mus musculus
  misc_feature (27)..(27): n is a, c, g, or t
  misc_feature (35)..(35): n is a, c, g, or t
  misc_feature (157)..(157): n is a, c, g, or t
  misc_feature (159)..(160): n is a, c, g, or t
  misc_feature (162)..(165): n is a, c, g, or t
atcacccagatgcttcaggagcctggntcgcaggntctcctcaccagcggccggcacccacactcagggacgcagcagacaccactctactccgcagtgcttcagagaggacgcgccaggctgcagcagtgctgtggcagcaggtcgcagtctcatncnngnnnnggaggatctgccacaaggtggattactgaccctgcactggcttggccacatggccaggttcaggtcaggtgggcgctggactgaccttctgcagagaacacgccccaccctactgcagcctgtgggccacatggcagccttctgacggtgtggatttttaaactgtgtttataatgtattctaagttattttgtaaggtcctgtttgaagtgctgctgctagccctagttgctctcccagtttttattgtccattttcctgtgacagttgtacactaatgttc

SEQ ID NO: 3064 - DNA, 448 bp, Mus musculus; identical to SEQ ID NO: 3063
  misc_feature (27)..(27): n is a, c, g, or t
  misc_feature (35)..(35): n is a, c, g, or t
  misc_feature (157)..(157): n is a, c, g, or t
  misc_feature (159)..(160): n is a, c, g, or t
  misc_feature (162)..(165): n is a, c, g, or t

SEQ ID NO: 3065 - DNA, 404 bp, Mus musculus
  misc_feature (61)..(84): n is a, c, g, or t
  misc_feature (114)..(114): n is a, c, g, or t
  misc_feature (219)..(253): n is a, c, g, or t
gctgcacaccacaggcaggttgcttcttgtccaccagtacagagtgtcaagccgagtgctnnnnnnnnnnnnnnnnnnnnnnnngtggaaattctgaatggatgtctgagtgancattggacacctcgccaaggacaagctctgtgtgtctgggtctgcctcctgctgccgtggtgaggctgttgactctgggaggcattccagagcagaggagcacannnnnnnnnnnnnnnnnnnnnnnnnnnnnnnnnnnaatatttaaaattatttaaattgtgaagcctgttgctaaagaatatttatgaacactggtccatagcctgtactaatttacacattagcaatattgactgtatctgcattaaggagccaccgtggggccgttcgagtgacccgcagatgtg

SEQ ID NO: 3066 - DNA, 404 bp, Mus musculus; identical to SEQ ID NO: 3065
  misc_feature (61)..(84): n is a, c, g, or t
  misc_feature (114)..(114): n is a, c, g, or t
  misc_feature (219)..(253): n is a, c, g, or t

SEQ ID NO: 3067 - DNA, 508 bp, Mus musculus
  misc_feature (156)..(188): n is a, c, g, or t
  misc_feature (314)..(346): n is a, c, g, or t
  misc_feature (448)..(448): n is a, c, g, or t
accacagaagggtggtcaaatacacttgccctggtactatcaagttgtttcaatattcttttctataccacccacttgactgtcactattgccacagtgtgtcaaaagtgttgtcaagtgatgaaaaaaaaaaaggtttgaaaacaacatgttgannnnnnnnnnnnnnnnnnnnnnnnnnnnnnnnntcaggtttgattcctagcacccacatggttcacagccatctgcaactccagtcctaagggcttttttggtggtttgtatgagaatagttcccatgtgttaatatgttttaatgcttggtccgcagnnnnnnnnnnnnnnnnnnnnnnnnnnnnnnnnntgcatggagctgtttgagaaagatcagaggatgtgcccttgttggaggagatgtgtccctgggggaaggtcttgaaacttcaaatgcccactcactccattntcagcacctctcttcctcatgtctatgaatcaggatgggaagttctcagctacttctcta

SEQ ID NO: 3068 - DNA, 508 bp, Mus musculus; identical to SEQ ID NO: 3067
  misc_feature (156)..(188): n is a, c, g, or t
  misc_feature (314)..(346): n is a, c, g, or t
  misc_feature (448)..(448): n is a, c, g, or t

SEQ ID NO: 3069 - DNA, 586 bp, Mus musculus
  misc_feature (65)..(66): n is a, c, g, or t
  misc_feature (111)..(111): n is a, c, g, or t
  misc_feature (176)..(191): n is a, c, g, or t
  misc_feature (307)..(307): n is a, c, g, or t
  misc_feature (343)..(343): n is a, c, g, or t
  misc_feature (352)..(352): n is a, c, g, or t
  misc_feature (358)..(358): n is a, c, g, or t
  misc_feature (362)..(362): n is a, c, g, or t
  misc_feature (364)..(366): n is a, c, g, or t
  misc_feature (393)..(393): n is a, c, g, or t
  misc_feature (397)..(397): n is a, c, g, or t
  misc_feature (399)..(399): n is a, c, g, or t
  misc_feature (457)..(457): n is a, c, g, or t
  misc_feature (513)..(513): n is a, c, g, or t
  misc_feature (515)..(515): n is a, c, g, or t
  misc_feature (527)..(527): n is a, c, g, or t
  misc_feature (529)..(529): n is a, c, g, or t
actgcaggatgaagtctgggctgcagtaggtgaggtgtggtccaggctaactaggggccatgccnnccttcaggctcagtcaagcagagggaggacgttgaaagggagccnacggcctctatgaataggaagagagcgttgcgtagaccctcctattgcttctgtactgtccagannnnnnnnnnnnnnnnttttgccatctcctccctgctgtggatgtacaaccaggaacaggagcaatgcagtactaaactcaacacagccacctttggggtctagttggccatgggaatgaattgtgtgtttntgggtgagcttatgtccctgccctttgccaccccancctgtggcntggagntagnannntcaggacagcagggtagccaccctagntcantntcagcatggacaacagacccttttaaaagcagggctgacattggatgagcagcagggntccagcatgccccaggagagggagctatcaccccaccccaggggagcgacacaggntntttgtttgtatntnttgtaattacacattcatacctttgcgttcaataaagaagtgcgttggggactgcca

SEQ ID NO: 3070 - DNA, 586 bp, Mus musculus; identical to SEQ ID NO: 3069
  misc_feature (65)..(66): n is a, c, g, or t
  misc_feature (111)..(111): n is a, c, g, or t
  misc_feature (176)..(191): n is a, c, g, or t
  misc_feature (307)..(307): n is a, c, g, or t
  misc_feature (343)..(343): n is a, c, g, or t
  misc_feature (352)..(352): n is a, c, g, or t
  misc_feature (358)..(358): n is a, c, g, or t
  misc_feature (362)..(362): n is a, c, g, or t
  misc_feature (364)..(366): n is a, c, g, or t
  misc_feature (393)..(393): n is a, c, g, or t
  misc_feature (397)..(397): n is a, c, g, or t
  misc_feature (399)..(399): n is a, c, g, or t
  misc_feature (457)..(457): n is a, c, g, or t
  misc_feature (513)..(513): n is a, c, g, or t
  misc_feature (515)..(515): n is a, c, g, or t
  misc_feature (527)..(527): n is a, c, g, or t
  misc_feature (529)..(529): n is a, c, g, or t

SEQ ID NO: 3071 - DNA, 366 bp, Mus musculus
  misc_feature (239)..(245): n is a, c, g, or t
  misc_feature (247)..(251): n is a, c, g, or t
  misc_feature (253)..(256): n is a, c, g, or t
  misc_feature (258)..(258): n is a, c, g, or t
  misc_feature (261)..(278): n is a, c, g, or t
  misc_feature (328)..(328): n is a, c, g, or t
  misc_feature (333)..(333): n is a, c, g, or t
tcccacttcctctgggtgaaagtatatttgatagaaatatgaatctttctggatgttctgtgtctgaggtattgaccacaccatgtctgcctgctggggagcaggacactgccatcccctcagacctgtacagtccctggaaggtgaggggtcattctttttctccattgtatattggtgggcactctttttttttaaaggcacctttcctcccgcatgcaacgaggacttgagggagnnnnnnngnnnnnannnntnggnnnnnnnnnnnnnnnnnnctgctgacgtgatggcctgaagttagccttcacaagcctttgtccctgtnagtancaccatgctccgagcccctctgtgtgtgtctct

SEQ ID NO: 3072 - DNA, 366 bp, Mus musculus; identical to SEQ ID NO: 3071
  misc_feature (239)..(245): n is a, c, g, or t
  misc_feature (247)..(251): n is a, c, g, or t
  misc_feature (253)..(256): n is a, c, g, or t
  misc_feature (258)..(258): n is a, c, g, or t
  misc_feature (261)..(278): n is a, c, g, or t
  misc_feature (328)..(328): n is a, c, g, or t
  misc_feature (333)..(333): n is a, c, g, or t

SEQ ID NO: 3073 - DNA, 292 bp, Mus musculus
  misc_feature (90)..(90): n is a, c, g, or t
  misc_feature (262)..(262): n is a, c, g, or t
gaggtcccaggtcctgacctgcgtgcactgctgccccctgaagccctggcctgctgggcatgtacacagagccactgggagctctgcccnagggtaggtgacatgtggccgtggttcctacttctcacagcagcgcaagtgcccagtcagcactgtccacccaaggcggacagactcctcacaggtgtgctcagcagagctcagccttgagcctgcagacccatcaaaatgcactgggcacccagctggcctgatgtggctntccgggggtaccacagaacacccctgtaca

SEQ ID NO: 3074 - DNA, 292 bp, Mus musculus; identical to SEQ ID NO: 3073
  misc_feature (90)..(90): n is a, c, g, or t
  misc_feature (262)..(262): n is a, c, g, or t

SEQ ID NO: 3075 - DNA, 546 bp, Mus musculus
  misc_feature (28)..(28): n is a, c, g, or t
  misc_feature (83)..(84): n is a, c, g, or t
  misc_feature (106)..(106): n is a, c, g, or t
  misc_feature (132)..(132): n is a, c, g, or t
  misc_feature (228)..(257): n is a, c, g, or t
gttattggtggcagcctcaggatcttgnccttagtcctggtacccagatctgttctcctgagactcatccaagaggctgtggnnccatgcttggtagctgcctctncctggccacaaagaactgagcagtgncagggtgggtcttgactaaaaggtggagctaagggcatatagaatgtcccatgtccctccctccactggacaagaaaggcaagaaagctggctctnnnnnnnnnnnnnnnnnnnnnnnnnnnnnntggcaccaccctgctgtcgtcttctggaggccatggggtcacacctctcctgaggctagccaggttacttgcccacggcccacattatcagagagccaaagggctttctctccaggcctggggacactttcctcctaccgtccatcttccatgggtcatggctggcctctggctgtgactatttgcagttttgtcaccaggaacaacccccgcatcctattctgaggtgaggcagatggaatggtatccttgatgacaaattcaatgacaatacagtgtatgagttcac

SEQ ID NO: 3076 - DNA, 546 bp, Mus musculus; identical to SEQ ID NO: 3075
  misc_feature (28)..(28): n is a, c, g, or t
  misc_feature (83)..(84): n is a, c, g, or t
  misc_feature (106)..(106): n is a, c, g, or t
  misc_feature (132)..(132): n is a, c, g, or t
  misc_feature (228)..(257): n is a, c, g, or t

SEQ ID NO: 3077 - DNA, 144 bp, Mus musculus
tttttcagtccctgtggaatcagattcttttaaaaaaaaaaaaggaaaaaaaactgttcagctacttgcgaccaccctggacctgcctgcctcagcccccacattgatgaatgctaggctacatggcgggttcatccaccacac

SEQ ID NO: 3078 - DNA, 144 bp, Mus musculus; identical to SEQ ID NO: 3077

SEQ ID NO: 3079 - DNA, 485 bp, Mus musculus
  misc_feature (27)..(57): n is a, c, g, or t
  misc_feature (89)..(89): n is a, c, g, or t
  misc_feature (91)..(94): n is a, c, g, or t
  misc_feature (96)..(96): n is a, c, g, or t
  misc_feature (98)..(102): n is a, c, g, or t
  misc_feature (105)..(109): n is a, c, g, or t
  misc_feature (331)..(345): n is a, c, g, or t
ttgcattggggaactacatgaacagcnnnnnnnnnnnnnnnnnnnnnnnnnnnnnnntccagagcctggacctgctgctggacaccaantnnnngncnnnnngannnnnctgctgtcctgcattgcctcctgctccacttccttaaaaccaaaggattgtggaggaagacctgtggctttcaaaagtggaaaaagaagggctaacacttaacatgcagagtgggtggcagtgggagcagctgacccctggcggtctccctctggatgggcacttcctgctccaaacaatgcaaggaagggcttggaccccaccctgcctgctgtcttcccnnnnnnnnnnnnnnngaggcactgtctgtcccagctccaagactgctagaggaaggatgtgccgcaatctcacctttcctcagctaggtggactctggcccaggaacaggcaacagaggatcttcacagactatttgctcaattccctactgggc

SEQ ID NO: 3080 - DNA, 485 bp, Mus musculus; identical to SEQ ID NO: 3079
  misc_feature (27)..(57): n is a, c, g, or t
  misc_feature (89)..(89): n is a, c, g, or t
  misc_feature (91)..(94): n is a, c, g, or t
  misc_feature (96)..(96): n is a, c, g, or t
  misc_feature (98)..(102): n is a, c, g, or t
  misc_feature (105)..(109): n is a, c, g, or t
  misc_feature (331)..(345): n is a, c, g, or t

SEQ ID NO: 3081 - DNA, 152 bp, Mus musculus
agcatggctcacaggccttgtgtctgggtgaagggaacccagggtcaggctgcacttctgtttctgtcttttgctcaacagcggggtgtgcactcgtggctgcacagatgaagcccatgctgagtctgtgggaacacccacactcagtgcac

SEQ ID NO: 3082 - DNA, 152 bp, Mus musculus; identical to SEQ ID NO: 3081

SEQ ID NO: 3083 - DNA, 71 bp, Mus musculus
gcattgtttaaatccaagtgcagtgcaagtctgtgaactgatctgttgcactgtcttatggcttcttattc

SEQ ID NO: 3084 - DNA, 71 bp, Mus musculus; identical to SEQ ID NO: 3083

SEQ ID NO: 3085 - DNA, 421 bp, Mus musculus
gtttccgagcctccagcagtgtcacctgctcccgaactagaaggagagagacaatggttggggccatgcctatcccactggactaccactcctttgtcttatttgtctccaaattaccagatggactcagtgactccttagaacttgaagccttgggctcagtcagaagatgggatggagagaccagagtctgcgctggcttcttggccaatggggcctgtgctggagtgtcactctgcaggtggcacccagttaggaggctatcagatagttatcaatccccatgcctacacttgggctacctccttaatgttgcacccattcactgtatgaccttagtggggtagctttacctccagagccctgccacccaatgacagaaccatccaaagtttcccagcctaacttcctcggcaggaag

SEQ ID NO: 3086 - DNA, 421 bp, Mus musculus; identical to SEQ ID NO: 3085

SEQ ID NO: 3087 - DNA, 580 bp, Mus musculus
  misc_feature (77)..(80): n is a, c, g, or t
  misc_feature (82)..(86): n is a, c, g, or t
  misc_feature (88)..(92): n is a, c, g, or t
  misc_feature (94)..(103): n is a, c, g, or t
  misc_feature (106)..(107): n is a, c, g, or t
  misc_feature (109)..(109): n is a, c, g, or t
  misc_feature (111)..(112): n is a, c, g, or t
  misc_feature (114)..(115): n is a, c, g, or t
  misc_feature (117)..(120): n is a, c, g, or t
  misc_feature (122)..(123): n is a, c, g, or t
  misc_feature (126)..(127): n is a, c, g, or t
  misc_feature (129)..(131): n is a, c, g, or t
  misc_feature (214)..(215): n is a, c, g, or t
  misc_feature (217)..(220): n is a, c, g, or t
  misc_feature (222)..(223): n is a, c, g, or t
  misc_feature (233)..(233): n is a, c, g, or t
  misc_feature (237)..(237): n is a, c, g, or t
  misc_feature (240)..(241): n is a, c, g, or t
  misc_feature (244)..(244): n is a, c, g, or t
  misc_feature (246)..(246): n is a, c, g, or t
  misc_feature (250)..(250): n is a, c, g, or t
  misc_feature (252)..(252): n is a, c, g, or t
  misc_feature (551)..(551): n is a, c, g, or t
atttaccaagggacgctggagctccccaccccactcattgctgcccaccagctgtataactatgtggctgaccatgnnnntnnnnncnnnnngnnnnnnnnnnganngncnngnncnnnngnnccnnannntaaactcagacacagaatgacactaaaggactgagtatgtctgggagaagtgctgctacagcctggcaacaggaacatagctnntnnnnannccggactcgncctnagnnccntnggcntntgcagaagaggatgcctccttcctgcacacctggtggagtgccagggaatgtcacatgatctgacaagctctcacctctaagagctctgccacttggccatcactgttggacattaccattgagatagacttggttccgatcttgactcggcctgtcaagcacctgtgaccagtcttacctcctcccgtccccactggacctttggttcctcatctgtggataaggagggctcagaagtctcctgtgtccacagcaaccctggaggatttgagcttgagctgtgtgtcccttctcagtnggagggaattaacctggagacattgaagc

SEQ ID NO: 3088 - DNA, 580 bp, Mus musculus; identical to SEQ ID NO: 3087
  misc_feature (77)..(80): n is a, c, g, or t
  misc_feature (82)..(86): n is a, c, g, or t
  misc_feature (88)..(92): n is a, c, g, or t
  misc_feature (94)..(103): n is a, c, g, or t
  misc_feature (106)..(107): n is a, c, g, or t
  misc_feature (109)..(109): n is a, c, g, or t
  misc_feature (111)..(112): n is a, c, g, or t
  misc_feature (114)..(115): n is a, c, g, or t
  misc_feature (117)..(120): n is a, c, g, or t
  misc_feature (122)..(123): n is a, c, g, or t
  misc_feature (126)..(127): n is a, c, g, or t
  misc_feature (129)..(131): n is a, c, g, or t
  misc_feature (214)..(215): n is a, c, g, or t
  misc_feature (217)..(220): n is a, c, g, or t
  misc_feature (222)..(223): n is a, c, g, or t
  misc_feature (233)..(233): n is a, c, g, or t
  misc_feature (237)..(237): n is a, c, g, or t
  misc_feature (240)..(241): n is a, c, g, or t
  misc_feature (244)..(244): n is a, c, g, or t
  misc_feature (246)..(246): n is a, c, g, or t
  misc_feature (250)..(250): n is a, c, g, or t
  misc_feature (252)..(252): n is a, c, g, or t
  misc_feature (551)..(551): n is a, c, g, or t

SEQ ID NO: 3089 - DNA, 272 bp, Mus musculus
  misc_feature (39)..(39): n is a, c, g, or t
  misc_feature (95)..(109): n is a, c, g, or t
  misc_feature (219)..(219): n is a, c, g, or t
actcgcctgcgtgacgtgtcacgatgtctgaccggaagncagtgatcaagaacgcagacatgtctgaggacatgcaacaggatgccgttgactgnnnnnnnnnnnnnnnggagaagtacaacatagagaaggacattgctgcctatatcaagaaggaatttgacaagaaatataaccctacctggcattgtatcgtgggccggaattttggcagctatntcacacacgagacaaagcacttcatctatttttacttgggtcaagttgcaatc

SEQ ID NO: 3090 - DNA, 272 bp, Mus musculus; identical to SEQ ID NO: 3089
  misc_feature (39)..(39): n is a, c, g, or t
  misc_feature (95)..(109): n is a, c, g, or t
  misc_feature (219)..(219): n is a, c, g, or t

SEQ ID NO: 3091 - DNA, 471 bp, Mus musculus
  misc_feature (212)..(226): n is a, c, g, or t
  misc_feature (382)..(383): n is a, c, g, or t
  misc_feature (392)..(392): n is a, c, g, or t
  misc_feature (411)..(411): n is a, c, g, or t
  misc_feature (421)..(421): n is a, c, g, or t
  misc_feature (430)..(430): n is a, c, g, or t
  misc_feature (432)..(432): n is a, c, g, or t
tctgactacagatgtaattaaaggcttttcttactatgttttaaccaaagatgtggagcaatccaagccgcatatctactgcattaaatttgtccatttggttattcataatcgggtattgcattttgccttccctgtccatacctcaaattgattgatacctcagtttaattcagagaggttcgctaagtgttggattctagttgtggttnnnnnnnnnnnnnnnactcttgaagtaagcaggcaagggtcactgcaggcatgaagcttggattgcttcagatggtttgccgtatcgtttttcttccttttccttttctggggacttgtttccattcaatgacaattaaaatagcttgtaaatgagggcatacaagcattnncaacaagtnttcaaatagaggctcacancggcataagntggactttntngccactagatgacaagatggtatacctaagctaaccaca

SEQ ID NO: 3092 - DNA, 471 bp, Mus musculus; identical to SEQ ID NO: 3091
  misc_feature (212)..(226): n is a, c, g, or t
  misc_feature (382)..(383): n is a, c, g, or t
  misc_feature (392)..(392): n is a, c, g, or t
  misc_feature (411)..(411): n is a, c, g, or t
  misc_feature (421)..(421): n is a, c, g, or t
  misc_feature (430)..(430): n is a, c, g, or t
  misc_feature (432)..(432): n is a, c, g, or t

SEQ ID NO: 3093 - DNA, 198 bp, Mus musculus
  misc_feature (60)..(60): n is a, c, g, or t
  misc_feature (89)..(89): n is a, c, g, or t
  misc_feature (101)..(101): n is a, c, g, or t
  misc_feature (109)..(109): n is a, c, g, or t
  misc_feature (118)..(118): n is a, c, g, or t
tataccaaaacctaggcgaatcctgcgctcagcctggggcagcaacccatacttccgggnttcctattcctacacacaggtgggctcangtggggcggatntggagaanctagccaancccctgccctacacagagagctccaagacagcgcccatgcaggtgctcttctccggggaggccacacaccgcaagtacta

SEQ ID NO: 3094 - DNA, 198 bp, Mus musculus; identical to SEQ ID NO: 3093
  misc_feature (60)..(60): n is a, c, g, or t
  misc_feature (89)..(89): n is a, c, g, or t
  misc_feature (101)..(101): n is a, c, g, or t
  misc_feature (109)..(109): n is a, c, g, or t
  misc_feature (118)..(118): n is a, c, g, or t

SEQ ID NO: 3095 - DNA, 272 bp, Mus musculus
  misc_feature (85)..(85): n is a, c, g, or t
atgtcaacagccttggttgaggtgggaatgcaattgatgggagcctgctgctgtgtccttctctactctgttctgtccgtgaggnctttccttctgttgcccctccccctcccgcttcccctaggatcccctcgcctctatttccatttcactctggggatccctgctcctccctcttctcagcctcctccctcttttgtcctcttttcctctcctgcctgagcagtaccaaggtcttactgtctctattcctttctccatggcctgctttg

SEQ ID NO: 3096 - DNA, 272 bp, Mus musculus; identical to SEQ ID NO: 3095
  misc_feature (85)..(85): n is a, c, g, or t

SEQ ID NO: 3097 - DNA, 581 bp, Mus musculus
  misc_feature (63)..(77): n is a, c, g, or t
  misc_feature (194)..(194): n is a, c, g, or t
  misc_feature (211)..(211): n is a, c, g, or t
ttggcttgctactgcctaccacctgttcccacaatcctccgtgacaccgttccctccctcatnnnnnnnnnnnnnnntcttccctctccctaattccaggggactccaagttcatctagagggccattttgcatcatcctcttcctctgtgatcttcgaccagagcatcacgttcctaccctctgagccatgtntccgcggctgctgcccnatggccgcacttgactgtctgctttctcttgccatgatccttactccagccacccagatctaggttccccataggccctgttcatgtttcttcctctcatagacatgcccttcttccctacagcctgcctcctcaaaggcccagccctgagttctctttgtgttcagagcagaagcagctctatgctattctgtggccccatggcaatttggtgtcttgcttctggctcttaccactctggccggtgtagctgcagccaactgtgtactgtgttgcctccctctagactgtgagctcctcgtgggcagggaccatatggtcactctgtatctcttgtggcacctaaaagtgccttgcacttggtaggtgc

SEQ ID NO: 3098 - DNA, 581 bp, Mus musculus; identical to SEQ ID NO: 3097
  misc_feature (63)..(77): n is a, c, g, or t
  misc_feature (194)..(194): n is a, c, g, or t
  misc_feature (211)..(211): n is a, c, g, or t

SEQ ID NO: 3099 - DNA, 171 bp, Mus musculus
tgctcggtgctctggatctgacagttgtagcatttgaatctcaagtatacaaagtgcagatgtcttcattcattgaactgcgttccagagcctgtacaggtgggcctggtgactggctcagtgtgtgttgccaagcttgacaacctgtgctccatccctgggtccttcatg

SEQ ID NO: 3100 - DNA, 171 bp, Mus musculus; identical to SEQ ID NO: 3099

SEQ ID NO: 3101 - DNA, 171 bp, Mus musculus; identical to SEQ ID NO: 3099

SEQ ID NO: 3102 - DNA, 459 bp, Mus musculus
  misc_feature (26)..(40): n is a, c, g, or t
  misc_feature (241)..(243): n is a, c, g, or t
  misc_feature (249)..(250): n is a, c, g, or t
  misc_feature (371)..(371): n is a, c, g, or t
ggtggcttcggatgcagatcatgacnnnnnnnnnnnnnnncatctctgacaagatctacatacactgaagagctgaagaggtcccttcggtctccgccagggaacctggtgggagggagaaagatgaggggagggagtttaccttttgattagctgttgaggattacccactgtcttaggaagacctattttaaccttacgtgttcaatgtggtgaatggtttgggccttcacaaattagnnngggggnnggcggagggcgcaggtgggtggccctaaacctcagggccaatatggtgcttctatctatctcgagttgattttatataaagatttgtggggaaatatctttatattaaaagcaggttattngaatagaatccaaaatcattttccagccaaaacatccattcgaaatctgtatcccatttgatccttatgtaagtctcatgagtaaaca

SEQ ID NO: 3103 - DNA, 459 bp, Mus musculus; identical to SEQ ID NO: 3102
  misc_feature (26)..(40): n is a, c, g, or t
  misc_feature (241)..(243): n is a, c, g, or t
  misc_feature (249)..(250): n is a, c, g, or t
  misc_feature (371)..(371): n is a, c, g, or t

SEQ ID NO: 3104 - DNA, 385 bp, Mus musculus
  misc_feature (244)..(260): n is a, c, g, or t
  misc_feature (318)..(318): n is a, c, g, or t
  misc_feature (320)..(320): n is a, c, g, or t
  misc_feature (337)..(337): n is a, c, g, or t
  misc_feature (342)..(342): n is a, c, g, or t
  misc_feature (345)..(345): n is a, c, g, or t
  misc_feature (351)..(351): n is a, c, g, or t
  misc_feature (353)..(353): n is a, c, g, or t
  misc_feature (357)..(357): n is a, c, g, or t
ttacccagcaagaatcccttgtttggctaagagcctggagaggatcccctcttcccaaataattcctctgccttctatttaaagctaaggtatccttctcttgggctctctcagcatcttgaccttttcagaccttcctctgctaacatcagggtattactatccactcttgaacctattatctctgcaacaatcttcagatgttcaaaaagccacacttcccaaaaatgcccttgcagggacnnnnnnnnnnnnnnnnncttagacagactcccagtgggtccccagtatgggggcaggaacttcagggccaggttntnggagaggggagggatanccttnttnttttcntntttntttttatcatcacaccagtgtttcagag

SEQ ID NO: 3105 - DNA, 385 bp, Mus musculus; identical to SEQ ID NO: 3104
  misc_feature (244)..(260): n is a, c, g, or t
  misc_feature (318)..(318): n is a, c, g, or t
  misc_feature (320)..(320): n is a, c, g, or t
  misc_feature (337)..(337): n is a, c, g, or t
  misc_feature (342)..(342): n is a, c, g, or t
  misc_feature (345)..(345): n is a, c, g, or t
  misc_feature (351)..(351): n is a, c, g, or t
  misc_feature (353)..(353): n is a, c, g, or t
  misc_feature (357)..(357): n is a, c, g, or t

SEQ ID NO: 3106 - DNA, 356 bp, Mus musculus
  misc_feature (105)..(121): n is a, c, g, or t
ttctgatctgaactgtctaaaagatggtactcttaacttcatttcctatgctgtcttctgaaactcagctctcatgcaaatatttgggcacagatggcaaatttnnnnnnnnnnnnnnnnncctggataagtataaaactagtttggatgctttggcttatgcatttgagattcaggagggtttctaatgttttgcactaacagaatctaaagatagctgttggagatactatatatttatgccttgtaaagccaggaagcaattttaagtttaaaatgaacatttttattcttttgtgtatgttttagtggggccccacttttaaactattctttttaccgaaagagagtgtcca

SEQ ID NO: 3107 - DNA, 356 bp, Mus musculus; identical to SEQ ID NO: 3106
  misc_feature (105)..(121): n is a, c, g, or t

SEQ ID NO: 3108 - DNA, 239 bp, Mus musculus
  misc_feature (48)..(56): n is a, c, g, or t
  misc_feature (58)..(61): n is a, c, g, or t
  misc_feature (93)..(110): n is a, c, g, or t
  misc_feature (156)..(170): n is a, c, g, or t
gcgaatcaaaacacacctaaagctgtcgcatcttcgcttagctcttgnnnnnnnnngnnnnttagagtcccaagtcaaagttgtggccctgtnnnnnnnnnnnnnnnnnngtgttctacaaggagtggaggccgacctttacctcacaggtgaaannnnnnnnnnnnnnnttctggatgctgcttccaaagggatcaatgtcatcctttgtgaacacagcaacactgaaagaggcttcc

SEQ ID NO: 3109 - DNA, 239 bp, Mus musculus; identical to SEQ ID NO: 3108
  misc_feature (48)..(56): n is a, c, g, or t
  misc_feature (58)..(61): n is a, c, g, or t
  misc_feature (93)..(110): n is a, c, g, or t
  misc_feature (156)..(170): n is a, c, g, or t

SEQ ID NO: 3110 - DNA, 614 bp, Mus musculus
  misc_feature (26)..(29): n is a, c, g, or t
  misc_feature (156)..(173): n is a, c, g, or t
  misc_feature (379)..(379): n is a, c, g, or t
  misc_feature (459)..(459): n is a, c, g, or t
tctgttccttgtggactccgagctannnnagacccaggccacagccatacccatctgtaccagcactgtgaccatccatcttccttccttggtgcaccagctccagcctcaggacttcctcctcctggccctgacagcccagctcttgtcccagcnnnnnnnnnnnnnnnnnnggagtttctgaggcaggggaggaggcttctccatgggaaccagacagccttgcttcactgtataagtgccctgatcacacgcagaatgaagtgccaggttgctcagaagcacaaagggtgtggctactggccctaaccatggactacgtggttctaaccaaagactctagaactctggggtgggggagaaacaatgtgttctgtgntccagaacctcggcttcctggcccatatggatgggcttggcaaggaacctacctcttctctaaggtgaagccctaaggtntgccaaggctgacacgtcttccttttctactgacagactttatatatatatatttatatacgtggtagttacctggggtggtggtgtcagggaattgaggcaaaatgactttactgtacctccggcctacagtggcaccccaataaacaggacaa

SEQ ID NO: 3111 - DNA, 614 bp, Mus musculus; identical to SEQ ID NO: 3110
  misc_feature (26)..(29): n is a, c, g, or t
  misc_feature (156)..(173): n is a, c, g, or t
  misc_feature (379)..(379): n is a, c, g, or t
  misc_feature (459)..(459): n is a, c, g, or t

SEQ ID NO: 3112 - DNA, 413 bp, Mus musculus
  misc_feature (243)..(243): n is a, c, g, or t
  misc_feature (245)..(245): n is a, c, g, or t
  misc_feature (260)..(260): n is a, c, g, or t
  misc_feature (270)..(271): n is a, c, g, or t
  misc_feature (298)..(298): n is a, c, g, or t
  misc_feature (300)..(300): n is a, c, g, or t
  misc_feature (303)..(303): n is a, c, g, or t
  misc_feature (311)..(311): n is a, c, g, or t
  misc_feature (317)..(317): n is a, c, g, or t
tcatcagccgacgactgggaggccccagcaggcctttggctcctccagttggctgactcctccctgatatttccctctgtccagatgcagaggggatttgtggacagggatgtggctgagtggggtacccaggatagactgggcagttgtagcaccatctggtggcctgtcttgtctatcattgaaggcccgcttctgggggaacagagctagtgctgagaggcctaaaggtcccattcagtntntgtgagaactggagntgggcactannctggaatgagtaggcctgggagataantnttnttggagantagganctgcccaggacagatgggctatagtgaccccgggcaggagggagcaagggttggttaactggagtaggatacttgtaagactgtcagaatggaagc

SEQ ID NO: 3113 - DNA, 413 bp, Mus musculus; identical to SEQ ID NO: 3112
  misc_feature (243)..(243): n is a, c, g, or t
  misc_feature (245)..(245): n is a, c, g, or t
  misc_feature (260)..(260): n is a, c, g, or t
  misc_feature (270)..(271): n is a, c, g, or t
  misc_feature (298)..(298): n is a, c, g, or t
  misc_feature (300)..(300): n is a, c, g, or t
  misc_feature (303)..(303): n is a, c, g, or t
  misc_feature (311)..(311): n is a, c, g, or t
  misc_feature (317)..(317): n is a, c, g, or t

SEQ ID NO: 3114 - DNA, 591 bp, Mus musculus
  misc_feature (226)..(226): n is a, c, g, or t
  misc_feature (250)..(264): n is a, c, g, or t
  misc_feature (524)..(562): n is a, c, g, or t
gtatcagtcaatgcagaaatccccttccgaggccttatggaaacccacccatgaggactcaaaaatcttactggttgactcacctgggatgggcgacggtgaggatgagcagcaagaagaaggtacttccaagcaggggactaaggctggcctgcaggagaagagcaaagaaggtgacacagaggagacccctgaggactcactcactgcagggggagacaccggnggccgtgaacctgtagaggaaaannnnnnnnnnnnnnnagggaagattgaggctgtggagatgcacctgaccagggagcacatgaagcgggtcctgggagaagtgtacctgcacacctggatcacagagaacaccagcatacccaccagagggctctgtaacttcctgatgtctgatgaggattatgatgacaggacagcacaggtcttgattggacatatctccaagaagatgaacaaacagaccttccctgagcgctgcagtctgtgtaaggagatcttaccattcacagatcgcnnnnnnnnnnnnnnnnnnnnnnnnnnnnnnnnnnnnnnntgctttctaacctaccagtcctgccagag

SEQ ID NO: 3115 - DNA, 591 bp, Mus musculus; identical to SEQ ID NO: 3114
  misc_feature (226)..(226): n is a, c, g, or t
  misc_feature (250)..(264): n is a, c, g, or t
  misc_feature (524)..(562): n is a, c, g, or t

SEQ ID NO: 3116 - DNA, 409 bp, Mus musculus
  misc_feature (76)..(91): n is a, c, g, or t
  misc_feature (325)..(325): n is a, c, g, or t
  misc_feature (348)..(348): n is a, c, g, or t
  misc_feature (376)..(376): n is a, c, g, or t
cttcggtctctcagagttggtgacatgtagctagctgtctgagagtgccagcctttcagtccccaaacaagaatgnnnnnnnnnnnnnnnnaaggctggggatgagtgtgctaatggctgtcagcaaacttcccggtatcaactcagtccagtgttatctgtgctcactccccacgaccctggggtggagcagcttttaaaatagccttaagcaaaaggacatcatcgtgtcattaaatttggtttagcaggaagaataaaagtagaagaaaaccatgcccgaagcgcaggagcctgggaacactgtaatcagtccgcagccaantccagtagagagaaggaaatcgntattgcacatgtataatatgaacccttnaccctgcggtgcggtgcgcgaacctgtaagctt

SEQ ID NO: 3117 - DNA, 409 bp, Mus musculus; identical to SEQ ID NO: 3116
  misc_feature (76)..(91): n is a, c, g, or t
  misc_feature (325)..(325): n is a, c, g, or t
  misc_feature (348)..(348): n is a, c, g, or t
  misc_feature (376)..(376): n is a, c, g, or t

SEQ ID NO: 3118 - DNA, 371 bp, Mus musculus
  misc_feature (260)..(260): n is a, c, g, or t
  misc_feature (271)..(271): n is a, c, g, or t
  misc_feature (273)..(273): n is a, c, g, or t
  misc_feature (277)..(277): n is a, c, g, or t
  misc_feature (281)..(281): n is a, c, g, or t
  misc_feature (284)..(284): n is a, c, g, or t
  misc_feature (288)..(288): n is a, c, g, or t
  misc_feature (292)..(293): n is a, c, g, or t
  misc_feature (306)..(307): n is a, c, g, or t
  misc_feature (312)..(312): n is a, c, g, or t
  misc_feature (321)..(321): n is a, c, g, or t
  misc_feature (324)..(324): n is a, c, g, or t
  misc_feature (326)..(326): n is a, c, g, or t
  misc_feature (340)..(340): n is a, c, g, or t
agacattgctgctgcggtacagcatgcaacagcgtgccaccttgcgaaaagaacacatcgcgctattctgttttgcaagcagagaaatttgctctctccagctaacgcagtattagttgtatctggaggtgttgcaagtaacttgtacatccgaaaagcattggaaattgtcgcaaatgcaacgcagtgcacgttgttgtgtccacctccaagactgtgcactgacaatggcatcatgattgcatggaatggaattgaangattacgtgcngncttnggcnttntacntganntagaagacatccnntatgnaccaaaatntcntnttggagtagacatntccagagaagttgcagaagctgccataaaag

SEQ ID NO: 3119 - DNA, 371 bp, Mus musculus; identical to SEQ ID NO: 3118
  misc_feature (260)..(260): n is a, c, g, or t
  misc_feature (271)..(271): n is a, c, g, or t
  misc_feature (273)..(273): n is a, c, g, or t
  misc_feature (277)..(277): n is a, c, g, or t
  misc_feature (281)..(281): n is a, c, g, or t
  misc_feature (284)..(284): n is a, c, g, or t
  misc_feature (288)..(288): n is a, c, g, or t
  misc_feature (292)..(293): n is a, c, g, or t
  misc_feature (306)..(307): n is a, c, g, or t
  misc_feature (312)..(312): n is a, c, g, or t
  misc_feature (321)..(321): n is a, c, g, or t
  misc_feature (324)..(324): n is a, c, g, or t
  misc_feature (326)..(326): n is a, c, g, or t
  misc_feature (340)..(340): n is a, c, g, or t

SEQ ID NO: 3120 - DNA, 549 bp, Mus musculus
  misc_feature (217)..(217): n is a, c, g, or t
  misc_feature (220)..(221): n is a, c, g, or t
  misc_feature (223)..(223): n is a, c, g, or t
  misc_feature (227)..(230): n is a, c, g, or t
  misc_feature (232)..(235): n is a, c, g, or t
  misc_feature (237)..(237): n is a, c, g, or t
  misc_feature (239)..(239): n is a, c, g, or t
  misc_feature (241)..(242): n is a, c, g, or t
  misc_feature (244)..(245): n is a, c, g, or t
tctcactcggacagagaaaaagctgcaatttcatgttctcaccagctttgatgtattcattacttggtaatgtaatatggctattgtcaaattccttttggaaataagcaaaagactccccaaaggccagcagcagctgctggctactttctgcttggtgcggaaacctgatctgaccctctttgtagtaatcaggtgtatctccagttttaaaaanaannanaaannnnannnngncntnntnncgtgttggttttgttttgttttgttttgttttgttttccttgttgttattttgtaattatcaaacccaggtaagatattggtattcctgcactggatttttgaaagaaacttagcagaagtcaggattaaaatactacacaaacatttcataagtgttcatcctatactagacatacacgaaggcggtgaggcttaggtgcaggatcggtttaagagactttgaaagcaacttggaacagttgatccacctccacattaaagtaaattatgaatatgcagaattagggatctgtccatcttgga

SEQ ID NO: 3121 - DNA, 549 bp, Mus musculus; identical to SEQ ID NO: 3120
  misc_feature (217)..(217): n is a, c, g, or t
  misc_feature (220)..(221): n is a, c, g, or t
  misc_feature (223)..(223): n is a, c, g, or t
  misc_feature (227)..(230): n is a, c, g, or t
  misc_feature (232)..(235): n is a, c, g, or t
  misc_feature (237)..(237): n is a, c, g, or t
  misc_feature (239)..(239): n is a, c, g, or t
  misc_feature (241)..(242): n is a, c, g, or t
  misc_feature (244)..(245): n is a, c, g, or t

SEQ ID NO: 3122 - DNA, 325 bp, Mus musculus
  misc_feature (67)..(81): n is a, c, g, or t
  misc_feature (108)..(108): n is a, c, g, or t
  misc_feature (189)..(189): n is a, c, g, or t
  misc_feature (216)..(259): n is a, c, g, or t
  misc_feature (274)..(274): n is a, c, g, or t
  misc_feature (278)..(278): n is a, c, g, or t
  misc_feature (291)..(291): n is a, c, g, or t
  misc_feature (300)..(300): n is a, c, g, or t
gccctaggacatgtgcgctacgtactgaaagacaagttaaaatggcttccgctgtatgggttctacnnnnnnnnnnnnnnnggaatttatgtaaaacgaagtgccaantttaatgataaagaaatgagaagcaagctgcagagctatgtgaacgcaggaacaccgatgtatcttgtgattttcccaganggaacaaggtataatgcaacatacacnnnnnnnnnnnnnnnnnnnnnnnnnnnnnnnnnnnnnnnnnnnncttgcagtattaaancacntactgacaccaanaataaaggncactcacgttgcttttgattctatg

SEQ ID NO: 3123 - DNA, 325 bp, Mus musculus; identical to SEQ ID NO: 3122
  misc_feature (67)..(81): n is a, c, g, or t
  misc_feature (108)..(108): n is a, c, g, or t
  misc_feature (189)..(189): n is a, c, g, or t
  misc_feature (216)..(259): n is a, c, g, or t
  misc_feature (274)..(274): n is a, c, g, or t
  misc_feature (278)..(278): n is a, c, g, or t
  misc_feature (291)..(291): n is a, c, g, or t
  misc_feature (300)..(300): n is a, c, g, or t

SEQ ID NO: 3124 - DNA, 536 bp, Mus musculus
  misc_feature (58)..(58): n is a, c, g, or t
  misc_feature (211)..(211): n is a, c, g, or t
  misc_feature (292)..(339): n is a, c, g, or t
  misc_feature (342)..(342): n is a, c, g, or t
  misc_feature (347)..(347): n is a, c, g, or t
  misc_feature (349)..(349): n is a, c, g, or t
  misc_feature (351)..(351): n is a, c, g, or t
  misc_feature (355)..(355): n is a, c, g, or t
  misc_feature (360)..(360): n is a, c, g, or t
  misc_feature (368)..(368): n is a, c, g, or t
  misc_feature (372)..(372): n is a, c, g, or t
  misc_feature (378)..(378): n is a, c, g, or t
  misc_feature (380)..(380): n is a, c, g, or t
  misc_feature (383)..(384): n is a, c, g, or t
  misc_feature (388)..(388): n is a, c, g, or t
  misc_feature (390)..(390): n is a, c, g, or t
  misc_feature (403)..(403): n is a, c, g, or t
gaagaaactgcagatgggcgtccttcaagctcccaacctaaacccagtgttgagagcngaggttggacaccacgacaaccgtcagtgtcttgagtctcttcctcttcctttcagtaactagatatttattgagtgtcaaataaaaaggtgccataatcttcagtagcgtacacagtagagtcatgacgcttttacacatcctggggtccanccaatggtgttcacgttttgggaaagtcctctccacattgcataggtctgtcttctttgtctcctgttcatagaagggccnnnnnnnnnnnnnnnnnnnnnnnnnnnnnnnnnnnnnnnnnnnnnnnngangactngngnaagngaatnacccgcanatanttcatntnggnntgantngttggtgaagaantctgcactgttcccatccatgaacacgtgtgtggcggatcctccagtcagtctatttaagttatgttttcagagacaaagaaggttgtttgatatacacattaataattaacaatgggccttgcaaacaaggc

SEQ ID NO: 3125 - DNA, 536 bp, Mus musculus; identical to SEQ ID NO: 3124
  misc_feature (58)..(58): n is a, c, g, or t
  misc_feature (211)..(211): n is a, c, g, or t
  misc_feature (292)..(339): n is a, c, g, or t
  misc_feature (342)..(342): n is a, c, g, or t
  misc_feature (347)..(347): n is a, c, g, or t
  misc_feature (349)..(349): n is a, c, g, or t
  misc_feature (351)..(351): n is a, c, g, or t
  misc_feature (355)..(355): n is a, c, g, or t
  misc_feature (360)..(360): n is a, c, g, or t
  misc_feature (368)..(368): n is a, c, g, or t
  misc_feature (372)..(372): n is a, c, g, or t
  misc_feature (378)..(378): n is a, c, g, or t
  misc_feature (380)..(380): n is a, c, g, or t
  misc_feature (383)..(384): n is a, c, g, or t
  misc_feature (388)..(388): n is a, c, g, or t
  misc_feature (390)..(390): n is a, c, g, or t
  misc_feature (403)..(403): n is a, c, g, or t

SEQ ID NO: 3126 - DNA, 493 bp, Mus musculus
tccttcaagattttctgtgatgatttctcaggtactttcaagtagcctgttacctattcagagagtctccttgagctcagaattaaaattgccctgaatttttgaagatccaaaatcttatgtaaatagccattggtagttaagtgggttttattttttagtcttgtgcttgcccttggtctgacataagtgatcagactgccaggagaagatgttagagaagctcactagagcctaccatctgttgaaggcacattttacacagtattccaagcccctagtgcataattagtagtgggtggttctcacatcagcttgacatctggagttagggttgtccgtctggggccttgtctgctgtcaggtgtgtacagacctgtgcttgtagtgtactgcaggcatgcacactagtccactgccaagtgtggccctaggcatgggatcccgggggctccaggaaaatgctattgtgtcatatctggaacacaacttt

SEQ ID NO: 3127 - DNA, 493 bp, Mus musculus; identical to SEQ ID NO: 3126

SEQ ID NO: 3128 - DNA, 305 bp, Mus musculus
  misc_feature (51)..(52): n is a, c, g, or t
agcgcctggcaactggcaagcatcgggtctgagggactacacagggcgcannacaaggcgctcatgggtttcagggagtgggagggactgtttttctccgttgctcttcctccttgttttctgggtgttttcctgcagagatcttttgggtttattttgagattcctccccccaaccccaccccattcagccactttgtattttactcctgggtcgatgcacctccgaccttcagcttttcctaactgcacttacgtggtctgcagcaacctctgccccctcctcccagagcagatggggtctgg

SEQ ID NO: 3129 - DNA, 305 bp, Mus musculus; identical to SEQ ID NO: 3128
  misc_feature (51)..(52): n is a, c, g, or t

SEQ ID NO: 3130 - DNA, 344 bp, Mus musculus
  misc_feature (253)..(277): n is a, c, g, or t
atctgccctttctgggtgatgcctccccctgagcaaaggcccagtgactatggaatccccatggacgtagagatggcgtatgtccaagatagcttcttgaccaacgatgttcttcaggagatggtgatgctggctgagttctacaagggtgcccctgacctggtgaagttccaagaggcctggagcccagagcatacctacctggacaaactcaagatgtccttggccagcaggaccccgaaggaccagggcnnnnnnnnnnnnnnnnnnnnnnnnngcagtgtgctcaagcaggggagctgaggctgcataggctttgctgtcctgggacaggctgggtaata

SEQ ID NO: 3131 - DNA, 344 bp, Mus musculus; identical to SEQ ID NO: 3130
  misc_feature (253)..(277): n is a, c, g, or t

SEQ ID NO: 3132 - DNA, 443 bp, Mus musculus
  misc_feature (239)..(239): n is a, c, g, or t
  misc_feature (247)..(247): n is a, c, g, or t
  misc_feature (249)..(249): n is a, c, g, or t
  misc_feature (262)..(264): n is a, c, g, or t
  misc_feature (268)..(269): n is a, c, g, or t
  misc_feature (272)..(272): n is a, c, g, or t
  misc_feature (275)..(275): n is a, c, g, or t
  misc_feature (277)..(277): n is a, c, g, or t
  misc_feature (286)..(286): n is a, c, g, or t
  misc_feature (291)..(291): n is a, c, g, or t
  misc_feature (294)..(294): n is a, c, g, or t
  misc_feature (307)..(308): n is a, c, g, or t
  misc_feature (310)..(310): n is a, c, g, or t
  misc_feature (312)..(312): n is a, c, g, or t
  misc_feature (314)..(314): n is a, c, g, or t
  misc_feature (316)..(317): n is a, c, g, or t
  misc_feature (319)..(319): n is a, c, g, or t
  misc_feature (324)..(326): n is a, c, g, or t
  misc_feature (328)..(331): n is a, c, g, or t
  misc_feature (340)..(340): n is a, c, g, or t
  misc_feature (363)..(363): n is a, c, g, or t
  misc_feature (418)..(418): n is a, c, g, or t
ttcccatatcaggtagcttgtagctagtcggtaaaagcagggggtgaagcagtcactttgtgatggatttgtttatggtgggggcttcagacagacaaagtatgtgctgcactgagctacccccactcctagtggtgtgattgtgtgttttgcctcctttattcattatcagatgtattgaaagtatggtagttgtttttgattgtttttttcagtaatactccgaagtgggaggattnaaggcatntnccaccgcctcctnnntaanntanttntngaattcaantcttntgnccaggtgatgatnntnantnanntnttccnnnannnntgaggtggntcagcaggggaagacatgttcantcaaggcaaccacctgagtccatcctatggaacccacacaatagaaagagctaantcctccgatttgcactgtgacctac

SEQ ID NO: 3133 - DNA, 443 bp, Mus musculus; identical to SEQ ID NO: 3132
  misc_feature (239)..(239): n is a, c, g, or t
  misc_feature (247)..(247): n is a, c, g, or t
  misc_feature (249)..(249): n is a, c, g, or t
  misc_feature (262)..(264): n is a, c, g, or t
  misc_feature (268)..(269): n is a, c, g, or t
  misc_feature (272)..(272): n is a, c, g, or t
  misc_feature (275)..(275): n is a, c, g, or t
  misc_feature (277)..(277): n is a, c, g, or t
  misc_feature (286)..(286): n is a, c, g, or t
  misc_feature (291)..(291): n is a, c, g, or t
  misc_feature (294)..(294): n is a, c, g, or t
  misc_feature (307)..(308): n is a, c, g, or t
  misc_feature (310)..(310): n is a, c, g, or t
  misc_feature (312)..(312): n is a, c, g, or t
  misc_feature (314)..(314): n is a, c, g, or t
  misc_feature (316)..(317): n is a, c, g, or t
  misc_feature (319)..(319): n is a, c, g, or t
  misc_feature (324)..(326): n is a, c, g, or t
  misc_feature (328)..(331): n is a, c, g, or t
  misc_feature (340)..(340): n is a, c, g, or t
  misc_feature (363)..(363): n is a, c, g, or t
  misc_feature (418)..(418): n is a, c, g, or t

SEQ ID NO: 3134 - DNA, 271 bp, Mus musculus
cttgctttatgtactgaaggcttaggtgaaggttgttactggccacaggggaatcacagcttcttagtcacctgaaagcaactcaacctgacttccgcttgggccatgggatttcaattggctgccaaggcttcgggtgagaccacagggtgggacctaggcaggatttccacaggttcgtggactgacgagggtccctaaagcctctgaagggaacctgagttgcccatctccattcatttcttcatggatgtacacagatgagggctca

SEQ ID NO: 3135 - DNA, 271 bp, Mus musculus; identical to SEQ ID NO: 3134

SEQ ID NO: 3136 - DNA, 371 bp, Mus musculus
  misc_feature (46)..(46): n is a, c, g, or t
  misc_feature (186)..(186): n is a, c, g, or t
  misc_feature (278)..(282): n is a, c, g, or t
ggagccccgtgagagatcattctgcctatgccttctgccctcggcnagtgatgctctaggttttcagtaaggagaagctggagccgccacgtactaagccatttccagtaacttcaccttcatgctttcctcatgcaacactaagggtcctctgtcaaaggctccatattcccatctttgcttcgntgcatgacacagcccctcccccaggctgttcctatatatacatgcatacacaaagcaagccagacagacggcaacttgtctttttttttttnnnnnaagaaaaaaaatcaggaaagagatttttatttctaaatctgcttgacccatctatatttaatatgcctcttctgcacataaccacagag

SEQ ID NO: 3137 - DNA, 371 bp, Mus musculus; identical to SEQ ID NO: 3136
  misc_feature (46)..(46): n is a, c, g, or t
  misc_feature (186)..(186): n is a, c, g, or t
  misc_feature (278)..(282): n is a, c, g, or t

SEQ ID NO: 3138 - DNA, 472 bp, Mus musculus
  misc_feature (108)..(109): n is a, c, g, or t
  misc_feature (112)..(114): n is a, c, g, or t
  misc_feature (118)..(118): n is a, c, g, or t
  misc_feature (162)..(162): n is a, c, g, or t
  misc_feature (304)..(318): n is a, c, g, or t
  misc_feature (428)..(428): n is a, c, g, or t
  misc_feature (447)..(447): n is a, c, g, or t
ggaagcctggagacaacaagccggcaagggccccttctaaggggaagctgatggagctccaggagccagaaagtggtttttccaagagctgactgtttctatgtcttnnttnnntttnttttgagtgtgaagatgtgaagactcactttctgatttgggggntttgggagggatgacgggaggtgaataagtgtgtgccacagtgggaagtcagaggccagcctgtaggagctggttctctctgtctaccatgggagtcccagagattgaactcaggtctcgagctttgacatcaagtgccttnnnnnnnnnnnnnnnctcaccagctccgactccatcatttcttggtgaattttcattacacaaagtattcctttatgaaaatacacactgctctattaaagacttgtgtacaaagtgtgctttcnggagggctaaacaagtcanggaaggaacttcattcccaagacag

SEQ ID NO: 3139 - DNA, 472 bp, Mus musculus; identical to SEQ ID NO: 3138
  misc_feature (108)..(109): n is a, c, g, or t
  misc_feature (112)..(114): n is a, c, g, or t
  misc_feature (118)..(118): n is a, c, g, or t
  misc_feature (162)..(162): n is a, c, g, or t
  misc_feature (304)..(318): n is a, c, g, or t
  misc_feature (428)..(428): n is a, c, g, or t
  misc_feature (447)..(447): n is a, c, g, or t

SEQ ID NO: 3140 - DNA, 413 bp, Mus musculus
  misc_feature (38)..(56): n is a, c, g, or t
  misc_feature (173)..(173): n is a, c, g, or t
  misc_feature (217)..(232): n is a, c, g, or t
  misc_feature (313)..(313): n is a, c, g, or t
ccacagtctgggaactgtattggggcagaggaaatgcnnnnnnnnnnnnnnnnnnngtttgctggtaggctgcctcttcagcatgccacccccatcccccactcccatgtgcatacccagagtcctgctgctgctccaggctgggctgctgccatccctacctgctgtctggnctgagtcttgaccctcagcaagccatgtccttagggtgagggannnnnnnnnnnnnnnntctgttctttgccttagctttgcagtgagtgttgctcatgtgcagcccttcccccatagggactgctgtcccctgaccccntgctttcagccccagaggccttggccagactgttgccttgaaagtgggatcctagagacaggccatccgtcctgcagccccatggaacaggatgatggtg

SEQ ID NO: 3141 - DNA, 413 bp, Mus musculus; identical to SEQ ID NO: 3140
  misc_feature (38)..(56): n is a, c, g, or t
  misc_feature (173)..(173): n is a, c, g, or t
  misc_feature (217)..(232): n is a, c, g, or t
  misc_feature (313)..(313): n is a, c, g, or t

SEQ ID NO: 3142 - DNA, 159 bp, Mus musculus
gaacagcaagcatccgcctgagcaggctgctgacccaagatcctgcctgagcaggcgggctgctgacccaagatccgtgcagtgtccgctttctgcacacgagcagaacttgggcttcagggaagcaggctcagcaagtgcggctgtgggtaaagactt

SEQ ID NO: 3143 - DNA, 159 bp, Mus musculus; identical to SEQ ID NO: 3142

SEQ ID NO: 3144 - DNA, 250 bp, Mus musculus
  misc_feature (130)..(130): n is a, c, g, or t
  misc_feature (133)..(133): n is a, c, g, or t
  misc_feature (135)..(135): n is a, c, g, or t
  misc_feature (137)..(137): n is a, c, g, or t
  misc_feature (142)..(142): n is a, c, g, or t
  misc_feature (145)..(145): n is a, c, g, or t
  misc_feature (154)..(154): n is a, c, g, or t
  misc_feature (156)..(156): n is a, c, g, or t
  misc_feature (189)..(189): n is a, c, g, or t
aaatgagggcccatgaaccatgccacagttgtttcctttcgatatttaaatctttcctccatagtaacatgataatgacataatctcacaacctcctcctgctgcttccatactgtggagttgtttgctnctnantnggtcnganccctccttncntgtttatgcttctttttaaagcaagagcctgancctcaatgggatgaatgaactgtattttatttagggtgcctctgtgccattgataacagtc

SEQ ID NO: 3145 - DNA, 250 bp, Mus musculus; identical to SEQ ID NO: 3144
  misc_feature (130)..(130): n is a, c, g, or t
  misc_feature (133)..(133): n is a, c, g, or t
  misc_feature (135)..(135): n is a, c, g, or t
  misc_feature (137)..(137): n is a, c, g, or t
  misc_feature (142)..(142): n is a, c, g, or t
  misc_feature (145)..(145): n is a, c, g, or t
  misc_feature (154)..(154): n is a, c, g, or t
  misc_feature (156)..(156): n is a, c, g, or t
  misc_feature (189)..(189): n is a, c, g, or t

SEQ ID NO: 3146 - DNA, 365 bp, Mus musculus
  misc_feature (59)..(59): n is a, c, g, or t
  misc_feature (128)..(128): n is a, c, g, or t
  misc_feature (135)..(135): n is a, c, g, or t
  misc_feature (177)..(177): n is a, c, g, or t
  misc_feature (187)..(187): n is a, c, g, or t
  misc_feature (192)..(192): n is a, c, g, or t
  misc_feature (204)..(204): n is a, c, g, or t
  misc_feature (290)..(290): n is a, c, g, or t
caggcaagctttgtgggtaaagacgaggggtcagggttcaacttgacagtgtacttcgntaggaaggagaggcccttgcctgctataaccatgcctagagtgcctgtcctccagtattgcacctgtanccggagntagggccaccccagtgcaggggcaaagcaaacctgatgtcantcgttttgtnttttntaccccaacctnaccctctcaccctactttccaccccccaccccgccttttttttttttttttttttttttttgtgccacattggcagaggggcctanaggtccttcactgttccctcctgtgtgttggagttctttagttagcagttcaggctggttggacaggtttgaatc

SEQ ID NO: 3147 - DNA, 365 bp, Mus musculus; identical to SEQ ID NO: 3146
  misc_feature (59)..(59): n is a, c, g, or t
  misc_feature (128)..(128): n is a, c, g, or t
  misc_feature (135)..(135): n is a, c, g, or t
  misc_feature (177)..(177): n is a, c, g, or t
  misc_feature (187)..(187): n is a, c, g, or t
  misc_feature (192)..(192): n is a, c, g, or t
  misc_feature (204)..(204): n is a, c, g, or t
  misc_feature (290)..(290): n is a, c, g, or t

SEQ ID NO: 3148 - DNA, 241 bp, Mus musculus
  misc_feature (117)..(117): n is a, c, g, or t
  misc_feature (174)..(174): n is a, c, g, or t
  misc_feature (184)..(186): n is a, c, g, or t
  misc_feature (189)..(195): n is a, c, g, or t
  misc_feature (197)..(198): n is a, c, g, or t
tgttgacttcaggaactacagacttagctgacgtcaatctctaaaaggcttaatagacacgaacacacttgtatggtatgcactcaaactcagattgctgtttcttttaaaaagtcntcatttgtattgacatgcttctgttcctagttccagtttggaggttttataaagttntaataataannnaannnnnnnannttcattattttgcatgtgacctaatctgaaaagtacatgtagt

SEQ ID NO: 3149 - DNA, 241 bp, Mus musculus; identical to SEQ ID NO: 3148
  misc_feature (117)..(117): n is a, c, g, or t
  misc_feature (174)..(174): n is a, c, g, or t
  misc_feature (184)..(186): n is a, c, g, or t
  misc_feature (189)..(195): n is a, c, g, or t
  misc_feature (197)..(198): n is a, c, g, or t

SEQ ID NO: 3150 - DNA, 390 bp, Mus musculus
  misc_feature (31)..(31): n is a, c, g, or t
  misc_feature (45)..(45): n is a, c, g, or t
  misc_feature (52)..(52): n is a, c, g, or t
  misc_feature (95)..(95): n is a, c, g, or t
  misc_feature (136)..(150): n is a, c, g, or t
  misc_feature (211)..(211): n is a, c, g, or t
  misc_feature (220)..(220): n is a, c, g, or t
  misc_feature (226)..(227): n is a, c, g, or t
taaaggcacattgatggactcaacaaagcanaaacatgacaaacnatacaantcctgtactgtcctcaaaaagggtttgcaattaatatcagtantcatttttgcaacaaagaaaaacagaacagatcagtgactnnnnnnnnnnnnnnntgtagccagcagaaatttctgatccacaaatgcatggattcctttgaagaaaaagaaaaanaaaaaaaanaaaaannaaaaaaaaatcacaaaaacaaacttttttttattcaaaaataacaaagttcttgtaaggtaaataatgtatttagcatgaagcatgaattattttcatataaatatagagaatagagagaagactatgcctctaacttttaagccctaaagcttagaggccct

SEQ ID NO: 3151 - DNA, 390 bp, Mus musculus; identical to SEQ ID NO: 3150
  misc_feature (31)..(31): n is a, c, g, or t
  misc_feature (45)..(45): n is a, c, g, or t
  misc_feature (52)..(52): n is a, c, g, or t
  misc_feature (95)..(95): n is a, c, g, or t
  misc_feature (136)..(150): n is a, c, g, or t
  misc_feature (211)..(211): n is a, c, g, or t
  misc_feature (220)..(220): n is a, c, g, or t
  misc_feature (226)..(227): n is a, c, g, or t

SEQ ID NO: 3152 - DNA, 279 bp, Mus musculus
  misc_feature (59)..(59): n is a, c, g, or t
  misc_feature (61)..(61): n is a, c, g, or t
  misc_feature (68)..(68): n is a, c, g, or t
  misc_feature (128)..(131): n is a, c, g, or t
  misc_feature (145)..(145): n is a, c, g, or t
aggctccagaaaaggctagcatccaccggctgatggaggcctttatcctgaggctacanantctgttnccgtctacagtcagcaccgtgtacaggacgagtgagaagctggtcaaagctccccgggannnntgtgccgctggccngtcagccccagctgcctcctgtgcatgtgtgccctggacattgacactgctgacagtgccacggcctttggggctcagtcctcctcacatctctcccagatgccgagtgctgaggctgggatgcctacccagcc

SEQ ID NO: 3153 - DNA, 279 bp, Mus musculus; identical to SEQ ID NO: 3152
  misc_feature (59)..(59): n is a, c, g, or t
  misc_feature (61)..(61): n is a, c, g, or t
  misc_feature (68)..(68): n is a, c, g, or t
  misc_feature (128)..(131): n is a, c, g, or t
  misc_feature (145)..(145): n is a, c, g, or t

SEQ ID NO: 3154 - DNA, 353 bp, Mus musculus
  misc_feature (26)..(44): n is a, c, g, or t
  misc_feature (74)..(170): n is a, c, g, or t
  misc_feature (328)..(328): n is a, c, g, or t
agaggcagtgacatctgagtctgtgnnnnnnnnnnnnnnnnnnnagactatggcccgctgctgggaggaaaacnnnnnnnnnnnnnnnnnnnnnnnnnnnnnnnnnnnnnnnnnnnnnnnnnnnnnnnnnnnnnnnnnnnnnnnnnnnnnnnnnnnnnnnnnnnnnnnnncctcagcagtcaaattcccagaagcagtccaggcggctgggctgaccccagagactcccgcagagatcctggccctggagcacaaggagacacgctgtatcccaatgcggagaggagatgactggacacagatgctgcgggtcaccattgagggcctntcccagcggtggaaagattgtgtag

SEQ ID NO: 3155 - DNA, 353 bp, Mus musculus; identical to SEQ ID NO: 3154
  misc_feature (26)..(44): n is a, c, g, or t
  misc_feature (74)..(170): n is a, c, g, or t
  misc_feature (328)..(328): n is a, c, g, or t

SEQ ID NO: 3156 - DNA, 499 bp, Mus musculus
  misc_feature (170)..(170): n is a, c, g, or t
  misc_feature (379)..(379): n is a, c, g, or t
  misc_feature (428)..(428): n is a, c, g, or t
  misc_feature (468)..(468): n is a, c, g, or t
  misc_feature (470)..(470): n is a, c, g, or t
tcacatgctgggaaacattaaaagtagtctaaattaggtttttttgcagaaaccttttgtaacaaacagtatgtcgtaatgtaactccagcagcaagctttgcttgtatttagtcaagtcagcttggaaatgcggccttggggcccactgcattctcagtccagcacatntagtagcagtgtggcggaaacacttttatggcaacatggagcagtattagattttatgtagctgacaatgcagtattaaagctcagtattttgcatatttttagcatttacaaatatttttgctttagtgtgagaaaaggaaagaaagacagaaggcagttgaatagttattattgtgacattaaacaaaaaataagctgggtaatatntccattaaaagctaaacctctaaaatgcctgtcagagtgtgtgctgttntggtaggccagcagcatggatgagaagacaaaaggatgtntntgagctaaagcgatcctgcacaggagtgt

SEQ ID NO: 3157 - DNA, 499 bp, Mus musculus; identical to SEQ ID NO: 3156
  misc_feature (170)..(170): n is a, c, g, or t
  misc_feature (379)..(379): n is a, c, g, or t
  misc_feature (428)..(428): n is a, c, g, or t
  misc_feature (468)..(468): n is a, c, g, or t
  misc_feature (470)..(470): n is a, c, g, or t

SEQ ID NO: 3158 - DNA, 587 bp, Mus musculus
  misc_feature (70)..(84): n is a, c, g, or t
  misc_feature (109)..(109): n is a, c, g, or t
  misc_feature (231)..(260): n is a, c, g, or t
  misc_feature (446)..(446): n is a, c, g, or t
  misc_feature (531)..(531): n is a, c, g, or t
ctccattgttttctgagagatggtcccaccctcaacccacagcagaaagcctgaacttggcttcctgccnnnnnnnnnnnnnnngtgtgtgtgtgtgagagagagaggngctgtgtggtagcgtgggacttcagcctttgctgccatctccttgtctgcactcttcttcaaagcacctctagccctggctccccaggatggagccaaggcaccggggcatgtgttgtattnnnnnnnnnnnnnnnnnnnnnnnnnnnnnncccttctttctcttcacctacccaccccccaccctgtgccccagcttgctgcttgtgccagttgacgtttctgctccagtgtttgattctagtgtctatatagaccccccaaccagcccccctcttcccgtttcctgagctcctccatcccatcaacagggagagaagcagccggagctcttggtntcagtttgcacagtgggtagggctggggagggggtttgttgtcgtgctgctggggctccccttgcccctcgtttcgggccctgcnctatgatatatgaaatgtatgtacagatcagagatgtttatacagccaataaagac

SEQ ID NO: 3159 - DNA, 587 bp, Mus musculus; identical to SEQ ID NO: 3158
  misc_feature (70)..(84): n is a, c, g, or t
  misc_feature (109)..(109): n is a, c, g, or t
  misc_feature (231)..(260): n is a, c, g, or t
  misc_feature (446)..(446): n is a, c, g, or t
  misc_feature (531)..(531): n is a, c, g, or t

SEQ ID NO: 3160 - DNA, 481 bp, Mus musculus
  misc_feature (207)..(225): n is a, c, g, or t
  misc_feature (236)..(268): n is a, c, g, or t
  misc_feature (342)..(358): n is a, c, g, or t
tgaactctagccatgccttagctgggatgtgcggccaccatggggaggaggccgcgtcacgcaggagtaaagatagaggaatgtttaacgcaccgggaagggtaaatgaatctatttttgtacaaatgtaattttatccctcatgtaaactggatggcatggtgggggacctattttgtttctgctttgagtgtcaaaaactgttgnnnnnnnnnnnnnnnnnnncagcagaggannnnnnnnnnnnnnnnnnnnnnnnnnnnnnnnngcacagacagacacttccttcggtgggaggggggccgcacgggcagggtttccttccccttcttggtgatttgnnnnnnnnnnnnnnnnnctcggtgcctgcctgcctgcctgcctgccggcctctgactgtgaactgactccccacggaactactcactgggacattgtggtgcagacgccggggggttgatgaacagcagtctcaggatta

SEQ ID NO: 3161 - DNA, 480 bp, Mus musculus
  misc_feature (207)..(225): n is a, c, g, or t
  misc_feature (236)..(268): n is a, c, g, or t
  misc_feature (342)..(358): n is a, c, g, or t
tgaactctagccatgccttagctgggatgtgcggccaccatggggaggaggccgcgtcacgcaggagtaaagatagaggaatgtttaacgcaccgggaagggtaaatgaatctatttttgtacaaatgtaattttatccctcatgtaaactggatggcatggtgggggacctattttgtttctgctttgagtgtcaaaaactgttgnnnnnnnnnnnnnnnnnnncagcagaggannnnnnnnnnnnnnnnnnnnnnnnnnnnnnnnngcacagacagacacttccttcggtgggaggggggccgcacgggcagggtttccttccccttcttggtgatttgnnnnnnnnnnnnnnnnnctcggtgcctgcctgcctgcctgcctgccggcctctgactgtgaactgactccccacggaactactcactgggacattgtggtgcagacgccggggggttgatgaacagcagtctcaggatt

SEQ ID NO: 3162 - DNA, 472 bp, Mus musculus
  misc_feature (47)..(89): n is a, c, g, or t
  misc_feature (107)..(107): n is a, c, g, or t
  misc_feature (110)..(110): n is a, c, g, or t
  misc_feature (115)..(147): n is a, c, g, or t
  misc_feature (150)..(150): n is a, c, g, or t
  misc_feature (348)..(348): n is a, c, g, or t
  misc_feature (409)..(409): n is a, c, g, or t
  misc_feature (411)..(411): n is a, c, g, or t
  misc_feature (414)..(425): n is a, c, g, or t
aaggcccttctctggtctcaattcccgtctcaaggccccaccttccnnnnnnnnnnnnnnnnnnnnnnnnnnnnnnnnnnnnnnnnnnnagcaggcttccccaccanatnccctnnnnnnnnnnnnnnnnnnnnnnnnnnnnnnnnngcnaccttctcgagaagggcctccccgaagagcagaggagcctgggtcccggggggagaaggagcctggattgcccccaccccgctgagggagttccccttgacccccatccccggggcttgtatatagattataaatatataagggggaaaggggtgggtggggaggggttgtgggtctggagtctcacttcccctcttntcctcccctagtcccctatccctggggccgtttgttaaaaaagaataataaaagaattttnanaannnnnnnnnnnnacccgacccccgcccctccttggccagggacagaacgcagggccaaa

SEQ ID NO: 3163 - DNA, 472 bp, Mus musculus; identical to SEQ ID NO: 3162
  misc_feature (47)..(89): n is a, c, g, or t
  misc_feature (107)..(107): n is a, c, g, or t
  misc_feature (110)..(110): n is a, c, g, or t
  misc_feature (115)..(147): n is a, c, g, or t
  misc_feature (150)..(150): n is a, c, g, or t
  misc_feature (348)..(348): n is a, c, g, or t
  misc_feature (409)..(409): n is a, c, g, or t
  misc_feature (411)..(411): n is a, c, g, or t
  misc_feature (414)..(425): n is a, c, g, or t

SEQ ID NO: 3164 - DNA, 609 bp, Mus musculus
  misc_feature (83)..(125): n is a, c, g, or t
  misc_feature (143)..(143): n is a, c, g, or t
  misc_feature (146)..(146): n is a, c, g, or t
  misc_feature (151)..(183): n is a, c, g, or t
  misc_feature (186)..(186): n is a, c, g, or t
  misc_feature (384)..(384): n is a, c, g, or t
  misc_feature (445)..(445): n is a, c, g, or t
  misc_feature (447)..(447): n is a, c, g, or t
  misc_feature (450)..(461): n is a, c, g, or t
  misc_feature (518)..(518): n is a, c, g, or t
  misc_feature (521)..(521): n is a, c, g, or t
  misc_feature (529)..(529): n is a, c, g, or t
  misc_feature (532)..(533): n is a, c, g, or t
  misc_feature (555)..(556): n is a, c, g, or t
  misc_feature (579)..(579): n is a, c, g, or t
tgggggtcctgggtcgtcacggactcccccatctggaaggcccttctctggtctcaattcccgtctcaaggccccaccttccnnnnnnnnnnnnnnnnnnnnnnnnnnnnnnnnnnnnnnnnnnnagcaggcttccccaccanatnccctnnnnnnnnnnnnnnnnnnnnnnnnnnnnnnnnngcnaccttctcgagaagggcctccccgaagagcagaggagcctgggtcccggggggagaaggagcctggattgcccccaccccgctgagggagttccccttgacccccatccccggggcttgtatatagattataaatatataagggggaaaggggtgggtggggaggggttgtgggtctggagtctcacttcccctcttntcctcccctagtcccctatccctggggccgtttgttaaaaaagaataataaaagaattttnanaannnnnnnnnnnnacccgacccccgcccctccttggccagggacagaacgcagggccaaaggggtttcanagngcccggtnccnncatatgcacggggcgagggtcnnggcagtcctggtttctaattttntttatgaaaattgtagctgcattggtactg

SEQ ID NO: 3165 - DNA, 609 bp, Mus musculus; identical to SEQ ID NO: 3164
  misc_feature (83)..(125): n is a, c, g, or t
  misc_feature (143)..(143): n is a, c, g, or t
  misc_feature (146)..(146): n is a, c, g, or t
  misc_feature (151)..(183): n is a, c, g, or t
  misc_feature (186)..(186): n is a, c, g, or t
  misc_feature (384)..(384): n is a, c, g, or t
  misc_feature (445)..(445): n is a, c, g, or t
  misc_feature (447)..(447): n is a, c, g, or t
  misc_feature (450)..(461): n is a, c, g, or t
  misc_feature (518)..(518): n is a, c, g, or t
  misc_feature (521)..(521): n is a, c, g, or t
  misc_feature (529)..(529): n is a, c, g, or t
  misc_feature (532)..(533): n is a, c, g, or t
  misc_feature (555)..(556): n is a, c, g, or t
  misc_feature (579)..(579): n is a, c, g, or t

SEQ ID NO: 3166 - DNA, 288 bp, Mus musculus
  misc_feature (75)..(89): n is a, c, g, or t
  misc_feature (206)..(206): n is a, c, g, or t
  misc_feature (252)..(252): n is a, c, g, or t
ccagccacctgagctgctggtaggggtaggggatctggggtctgggtgaagaaagggaccaagggcaggaacccnnnnnnnnnnnnnnncggggaagtagagttcaagggtgcctgagggaacagagggccgagtagcctcccgcctcacgttttccatgtctggccctgcctgcccagaggctctagtcaccaaggccctgggcnattgttgacagggacaaaggtatcccagcaacagggaagcgggcanccacagtctaagacctcagcttacttcctggtgcgg

SEQ ID NO: 3167 - DNA, 288 bp, Mus musculus; identical to SEQ ID NO: 3166
  misc_feature (75)..(89): n is a, c, g, or t
  misc_feature (206)..(206): n is a, c, g, or t
  misc_feature (252)..(252): n is a, c, g, or t

SEQ ID NO: 3168 - DNA, 162 bp, Mus musculus
  misc_feature (70)..(70): n is a, c, g, or t
  misc_feature (74)..(74): n is a, c, g, or t
  misc_feature (76)..(76): n is a, c, g, or t
  misc_feature (94)..(94): n is a, c, g, or t
  misc_feature (113)..(113): n is a, c, g, or t
taagggcacagtgacaaaggccacaaagtatgggccatgatctagagatccacagaaggaagtggatacntaantnttgggttggggagaatgntctgggatcactggtggcntcgctgaacatgcagagcccagggcctgctcattctgctagtgcatcct

SEQ ID NO: 3169 - DNA, 162 bp, Mus musculus; identical to SEQ ID NO: 3168
  misc_feature (70)..(70): n is a, c, g, or t
  misc_feature (74)..(74): n is a, c, g, or t
  misc_feature (76)..(76): n is a, c, g, or t
  misc_feature (94)..(94): n is a, c, g, or t
  misc_feature (113)..(113): n is a, c, g, or t

SEQ ID NO: 3170 - DNA, 488 bp, Mus musculus
  misc_feature (26)..(49): n is a, c, g, or t
  misc_feature (97)..(97): n is a, c, g, or t
  misc_feature (99)..(99): n is a, c, g, or t
  misc_feature (120)..(120): n is a, c, g, or t
  misc_feature (122)..(124): n is a, c, g, or t
  misc_feature (126)..(128): n is a, c, g, or t
  misc_feature (131)..(131): n is a, c, g, or t
  misc_feature (177)..(177): n is a, c, g, or t
  misc_feature (346)..(447): n is a, c, g, or t
tcatctcagggctggccaggagctgnnnnnnnnnnnnnnnnnnnnnnnnggtgaagttgggcgagttcaagcccaggttactaaggctggaaaggcntnccagcccaaaggagctgctantnnngnnngtnggtgtggagctactcctgggagccgatgatgtcgtcgccgccggcnccgccgccgtggtggtggtcgtggtcgtcgtgctcgttcccgcagtcgtgctgggctgcgtggtggcctggccctgcggacggttctggcttttgataaccaggtgaacagtcagtccatcatggatgccatgctgcatcaaggtatcttgatctttcaggatctttcnnnnnnnnnnnnnnnnnnnnnnnnnnnnnnnnnnnnnnnnnnnnnnnnnnnnnnnnnnnnnnnnnnnnnnnnnnnnnnnnnnnnnnnnnnnnnnnnnnnnnnccttctctttgggggtcttcacagtgactttgatgattttg

SEQ ID NO: 3171 - DNA, 488 bp, Mus musculus; identical to SEQ ID NO: 3170
  misc_feature (26)..(49): n is a, c, g, or t
  misc_feature (97)..(97): n is a, c, g, or t
  misc_feature (99)..(99): n is a, c, g, or t
  misc_feature (120)..(120): n is a, c, g, or t
  misc_feature (122)..(124): n is a, c, g, or t
  misc_feature (126)..(128): n is a, c, g, or t
  misc_feature (131)..(131): n is a, c, g, or t
  misc_feature (177)..(177): n is a, c, g, or t
  misc_feature (346)..(447): n is a, c, g, or t

SEQ ID NO: 3172 - DNA, 337 bp, Mus musculus
agggtgcccgttcctggctgtcccaccaccctgagggtttctgttctccacatgagtgcaatattccatccttggtggtcatcagaagagatgaccaccagggtcctgctcacagccagggaatcaggaagatggtgacttaagaatcaagaccagggctgtcactagaaaggctgcccggaaccccagtacccaggagccccggagcaagtagaaaggctgttgtcctgtgtgctaccttctccgcgtttcttctgccctctgctgaactgtcctcttgctctgtctttatctttaggtccccccatccttttcctttctttctgtgtgtacacgc

SEQ ID NO: 3173 - DNA, 337 bp, Mus musculus; identical to SEQ ID NO: 3172

SEQ ID NO: 3174 - DNA, 249 bp, Mus musculus
ctctctaggggcagccagcctggctagcacgtttccccaacaaatattccctggccacacgggcagctctcaccacctccagctgccaaacagcagcctgcaagtcagcaagtagtccaggctagccgtctctcagcacagctctccgggatgctcctgccagcacagggtccagcaggcatgcatgccccaggcagagacagtgagccttgctgccctctccagctcaggggcccttgtcctttgggt

SEQ ID NO: 3175 - DNA, 249 bp, Mus musculus; identical to SEQ ID NO: 3174

SEQ ID NO: 3176 - DNA, 539 bp, Mus musculus
  misc_feature (187)..(248): n is a, c, g, or t
  misc_feature (375)..(375): n is a, c, g, or t
  misc_feature (385)..(385): n is a, c, g, or t
  misc_feature (399)..(399): n is a, c, g, or t
  misc_feature (408)..(408): n is a, c, g, or t
  misc_feature (410)..(411): n is a, c, g, or t
  misc_feature (435)..(435): n is a, c, g, or t
  misc_feature (437)..(437): n is a, c, g, or t
  misc_feature (465)..(465): n is a, c, g, or t
  misc_feature (507)..(507): n is a, c, g, or t
  misc_feature (514)..(514): n is a, c, g, or t
accagccttctgagcgtgccttgagactagtggcaagttcaaaaattaatagccgttccttaacaatttttgggacaggagacaccctgaaagccatcacaatgactgccaatagtggttttgtcagagctgccaacaatcagggtgttaaattcagtgtgttcattcatcagcctagagcacttannnnnnnnnnnnnnnnnnnnnnnnnnnnnnnnnnnnnnnnnnnnnnnnnnnnnnnnnnnnnnctaatgctatcctttaagtattgtcatggaaatacattatttatactaaaggctggccttcccatatatattgggagaaaaaagtttataggaaacataatatttagacctgtttaagtagaagttntttgtgtttnatctatttaaggtntataaattngnnaaaaaaaaaaaacccaattgacantnttatgtatccctgcattccatcacagantacattgtagcaggtaagaacagaaagacatttgcataaggnttttagntaccttgtgatgcatttgcctcagt

SEQ ID NO: 3177 - DNA, 539 bp, Mus musculus; identical to SEQ ID NO: 3176
  misc_feature (187)..(248): n is a, c, g, or t
  misc_feature (375)..(375): n is a, c, g, or t
  misc_feature (385)..(385): n is a, c, g, or t
  misc_feature (399)..(399): n is a, c, g, or t
  misc_feature (408)..(408): n is a, c, g, or t
  misc_feature (410)..(411): n is a, c, g, or t
  misc_feature (435)..(435): n is a, c, g, or t
  misc_feature (437)..(437): n is a, c, g, or t
  misc_feature (465)..(465): n is a, c, g, or t
  misc_feature (507)..(507): n is a, c, g, or t
  misc_feature (514)..(514): n is a, c, g, or t

SEQ ID NO: 3178 - DNA, 482 bp, Mus musculus
  misc_feature (26)..(118): n is a, c, g, or t
  misc_feature (169)..(192): n is a, c, g, or t
  misc_feature (218)..(249): n is a, c, g, or t
  misc_feature (306)..(306): n is a, c, g, or t
  misc_feature (311)..(312): n is a, c, g, or t
  misc_feature (315)..(315): n is a, c, g, or t
  misc_feature (321)..(321): n is a, c, g, or t
  misc_feature (327)..(328): n is a, c, g, or t
  misc_feature (356)..(356): n is a, c, g, or t
  misc_feature (373)..(373): n is a, c, g, or t
  misc_feature (393)..(393): n is a, c, g, or t
  misc_feature (398)..(398): n is a, c, g, or t
  misc_feature (400)..(400): n is a, c, g, or t
  misc_feature (409)..(409): n is a, c, g, or t
  misc_feature (423)..(423): n is a, c, g, or t
  misc_feature (434)..(434): n is a, c, g, or t
  misc_feature (436)..(436): n is a, c, g, or t
atgttccgagatgcagctgccatctnnnnnnnnnnnnnnnnnnnnnnnnnnnnnnnnnnnnnnnnnnnnnnnnnnnnnnnnnnnnnnnnnnnnnnnnnnnnnnnnnnnnnnnnnnnnnaacaagatctgcaggagctgagcgtccaggtggaagaggagaggcgggccnnnnnnnnnnnnnnnnnnnnnnnngagcttcctgagggccacctggaggnnnnnnnnnnnnnnnnnnnnnnnnnnnnnnnntcagccccaagtagcagggctgaacccatcagaaccactgtcttccagtatccagtnggctnnccnccaatncagganntgcccccctccctgcgggcacccccacntggagggtggtccgtantgtccaaagtccagtggggntgagntnttcctcacntccccctgcctganttcaacctgtntnatcagtcacagtaaagacaattgcctaaccgaggaagcagagctgc

SEQ ID NO: 3179 - DNA, 482 bp, Mus musculus; identical to SEQ ID NO: 3178
  misc_feature (26)..(118): n is a, c, g, or t
  misc_feature (169)..(192): n is a, c, g, or t
  misc_feature (218)..(249): n is a, c, g, or t
  misc_feature (306)..(306): n is a, c, g, or t
  misc_feature (311)..(312): n is a, c, g, or t
  misc_feature (315)..(315): n is a, c, g, or t
  misc_feature (321)..(321): n is a, c, g, or t
  misc_feature (327)..(328): n is a, c, g, or t
  misc_feature (356)..(356): n is a, c, g, or t
  misc_feature (373)..(373): n is a, c, g, or t
  misc_feature (393)..(393): n is a, c, g, or t
  misc_feature (398)..(398): n is a, c, g, or t
  misc_feature (400)..(400): n is a, c, g, or t
  misc_feature (409)..(409): n is a, c, g, or t
  misc_feature (423)..(423): n is a, c, g, or t
  misc_feature (434)..(434): n is a, c, g, or t
  misc_feature (436)..(436): n is a, c, g, or t

SEQ ID NO: 3180 - DNA, 136 bp, Mus musculus
  misc_feature (40)..(41): n is a, c, g, or t
agctccgccttgtgcgctgcacagatctaggggagcctgnnacgggacgttgacaacgtggaataggagcagtatcatcccaccatgaggttggggatttaagagtggaagattgccaacagctgtggcctcccat

SEQ ID NO: 3181 - DNA, 136 bp, Mus musculus; identical to SEQ ID NO: 3180
  misc_feature (40)..(41): n is a, c, g, or t

SEQ ID NO: 3182 - DNA, 474 bp, Mus musculus
  misc_feature (32)..(64): n is a, c, g, or t
  misc_feature (218)..(218): n is a, c, g, or t
  misc_feature (311)..(325): n is a, c, g, or t
  misc_feature (335)..(335): n is a, c, g, or t
  misc_feature (337)..(337): n is a, c, g, or t
  misc_feature (342)..(342): n is a, c, g, or t
  misc_feature (388)..(413): n is a, c, g, or t
gtaggcccgaaattgacctcctcacctccagnnnnnnnnnnnnnnnnnnnnnnnnnnnnnnnnngtctgccaaacttactttgcttcctcggaaaagtttatcccgggtgccccgccccatcaattttcgagaccaaaataggaaataagtcacaggcccacgcacaaacaagaaagaaagaaagagagagagagaggaaaaaagagagcgaaaaaangacagacctaaggtgtttagctgtggcatgcaactggaatctcacaggagtaggatttgcacttgctggtcgcgggcctctgcttacatcctnnnnnnnnnnnnnnncaggggtgtntntgctntatggcaatgaagcagaaggatttaccgaatcctggtcaacaaggnnnnnnnnnnnnnnnnnnnnnnnnnngacaatagaattgggaagaatgtttacctctcgaagcccttgagaaattttcgtgaggtgc

SEQ ID NO: 3183 - DNA, 474 bp, Mus musculus; identical to SEQ ID NO: 3182
  misc_feature (32)..(64): n is a, c, g, or t
  misc_feature (218)..(218): n is a, c, g, or t
  misc_feature (311)..(325): n is a, c, g, or t
  misc_feature (335)..(335): n is a, c, g, or t
  misc_feature (337)..(337): n is a, c, g, or t
  misc_feature (342)..(342): n is a, c, g, or t
  misc_feature (388)..(413): n is a, c, g, or t

SEQ ID NO: 3184 - DNA, 564 bp, Mus musculus
  misc_feature (26)..(77): n is a, c, g, or t
  misc_feature (87)..(87): n is a, c, g, or t
  misc_feature (89)..(89): n is a, c, g, or t
  misc_feature (96)..(96): n is a, c, g, or t
  misc_feature (170)..(170): n is a, c, g, or t
  misc_feature (200)..(200): n is a, c, g, or t
  misc_feature (203)..(203): n is a, c, g, or t
  misc_feature (307)..(362): n is a, c, g, or t
  misc_feature (395)..(395): n is a, c, g, or t
  misc_feature (434)..(434): n is a, c, g, or t
ctgaactgtagtcacgttggacttcnnnnnnnnnnnnnnnnnnnnnnnnnnnnnnnnnnnnnnnnnnnnnnnnnnnnttggcgagcntntggggtntcctagttgcttccttctcactgttgttcgcctcctgtttccatggggacttgctgaagattaaaaggattttntcatttggaaaagcttggctggtttcccanttntctagactgctttccatggtgtcctgctgaatctaaaatccttacatgttttccctgttcagttgttttaaaatcagtatgcaatgttacccatttttaagatnnnnnnnnnnnnnnnnnnnnnnnnnnnnnnnnnnnnnnnnnnnnnnnnnnnnnnnnaaagtatatattttctctaaaaatcagttaatntccattattaaaaaaaaaagtatacatgagtaagttttnattcagtcaggatgacatcactccaggtgaatgcaaaccttcagagcgttgacataccttatctactatttactcagtgaaagatagctgcatttatacctcaggggggccgactgatactgcccatgcc

SEQ ID NO: 3185 - DNA, 564 bp, Mus musculus; identical to SEQ ID NO: 3184
  misc_feature (26)..(77): n is a, c, g, or t
  misc_feature (87)..(87): n is a, c, g, or t
  misc_feature (89)..(89): n is a, c, g, or t
  misc_feature (96)..(96): n is a, c, g, or t
  misc_feature (170)..(170): n is a, c, g, or t
  misc_feature (200)..(200): n is a, c, g, or t
  misc_feature (203)..(203): n is a, c, g, or t
  misc_feature (307)..(362): n is a, c, g, or t
  misc_feature (395)..(395): n is a, c, g, or t
  misc_feature (434)..(434): n is a, c, g, or t

SEQ ID NO: 3186 - DNA, 569 bp, Mus musculus
  misc_feature (337)..(337): n is a, c, g, or t
  misc_feature (453)..(453): n is a, c, g, or t
  misc_feature (458)..(458): n is a, c, g, or t
  misc_feature (462)..(462): n is a, c, g, or t
tacagggctgacagcgtggcctcagggagaggacagtctcaaggatgggcggggattgtcctgcacgtatgcaggaggtttgtcgctgaagccatgcgatggatccagagagactttttaataatccttaggtaataatttaagttgtgaagtgatgcgtattatgttgtgactgtcgcttgaattgaagccagtgctctaggagttcattgtcttcccacaatctgcagtgtcatctcaaaacacgtcttgatgctttgctccttgagaatacactagcccaaggtgactgtatttatgtaataatctacggcttctagcgtcaacgtacttaacnttgcctgaaatgtattcttaaccttaggtactgcttctttaatagaatgtagacaatagacgtgtttacctacagcttgtctgtttgctaatgtatttgagtcaaagaaggcatcntcacngagntctggtgtgcgagagcacctgaatgaagcgagcggtttacagcgcacacttggggtgcatcacctgcagtccacaggatattactgttgtcctggaagttatgagac

SEQ ID NO: 3187 - DNA, 241 bp, Mus musculus
ccttaaaggccaacaggttgcctgtgtcctttcatgcttttgaattctgaggcaggggagcaaacatggaaacagtgctttagccaaattccatatgtaatgccattggaagagtattgcctgaaaaattcaagtcagggagataaaatggtaacttttttagagaattttcctgggtaaacaaatgagccagccttccattgtatacattccaaatgccccaagcatctgctacattttg

SEQ ID NO: 3188 - DNA, 241 bp, Mus musculus; identical to SEQ ID NO: 3187

SEQ ID NO: 3189 - DNA, 178 bp, Mus musculus
  misc_feature (87)..(87): n is a, c, g, or t
ttccgggctgctacaacaattcacaccgggacaaggcgctgcacttctacacgtttcccaaggacgctgagttgcggcgcctctggntcaagaacgtgtcccgtgctggcgtcagtgggtgcttctccaccttccaacccaccaccggccaccgtctctgcagcgtccactttcaggg

SEQ ID NO: 3190 - DNA, 178 bp, Mus musculus; identical to SEQ ID NO: 3189
  misc_feature (87)..(87): n is a, c, g, or t

SEQ ID NO: 3191 - DNA, 598 bp, Mus musculus
  misc_feature (104)..(104): n is a, c, g, or t
  misc_feature (111)..(111): n is a, c, g, or t
  misc_feature (113)..(113): n is a, c, g, or t
  misc_feature (117)..(117): n is a, c, g, or t
  misc_feature (119)..(120): n is a, c, g, or t
  misc_feature (123)..(123): n is a, c, g, or t
  misc_feature (125)..(126): n is a, c, g, or t
  misc_feature (131)..(131): n is a, c, g, or t
  misc_feature (143)..(143): n is a, c, g, or t
  misc_feature (145)..(145): n is a, c, g, or t
  misc_feature (159)..(159): n is a, c, g, or t
  misc_feature (183)..(183): n is a, c, g, or t
  misc_feature (193)..(193): n is a, c, g, or t
  misc_feature (195)..(195): n is a, c, g, or t
  misc_feature (291)..(291): n is a, c, g, or t
  misc_feature (297)..(297): n is a, c, g, or t
  misc_feature (299)..(299): n is a, c, g, or t
  misc_feature (309)..(309): n is a, c, g, or t
  misc_feature (339)..(339): n is a, c, g, or t
  misc_feature (359)..(360): n is a, c, g, or t
  misc_feature (362)..(362): n is a, c, g, or t
  misc_feature (364)..(369): n is a, c, g, or t
  misc_feature (373)..(373): n is a, c, g, or t
  misc_feature (376)..(376): n is a, c, g, or t
  misc_feature (406)..(406): n is a, c, g, or t
  misc_feature (433)..(479): n is a, c, g, or t
  misc_feature (489)..(489): n is a, c, g, or t
  misc_feature (516)..(516): n is a, c, g, or t
ccatgtgacagaaggcaatgtctaggccaaaaatacttgtcagctccaagtattcacctgggtccacttgtctcagttaactgcctagaaatgtacaaaaggcnaagattntnatgncnnccntnnccccntgcttccccacntncaggaagcctttcntgacttcctgtgcccagagtgccntatgtgaaantntgtaccctgctaccagatgccaggtctgtgtgtgtattttgtatatatgtttcctgcccatacttcccaggctgaccttcaggcatggactgaatntggttntntctgtacccntcagccctccctagcctggagtgcacaccnataaactgtgttgttgagtnnanannnnnnaaanaanaacaatcgccgacgtgtcgtaggtaggtantcgtgcatcggcgtttacgctgatgannnnnnnnnnnnnnnnnnnnnnnnnnnnnnnnnnnnnnnnnnnnnnntcaagtcgtnatggaggcggtccggtcagtgcggttntgtttagaaacatcctcggtgttctgttggagactaaagcgtgtgtccacaatggggcgacctaggtatgtcacaagttggg

SEQ ID NO: 3192 - DNA, 598 bp, Mus musculus; identical to SEQ ID NO: 3191
  misc_feature (104)..(104): n is a, c, g, or t
  misc_feature (111)..(111): n is a, c, g, or t
  misc_feature (113)..(113): n is a, c, g, or t
  misc_feature (117)..(117): n is a, c, g, or t
  misc_feature (119)..(120): n is a, c, g, or t
  misc_feature (123)..(123): n is a, c, g, or t
  misc_feature (125)..(126): n is a, c, g, or t
  misc_feature (131)..(131): n is a, c, g, or t
  misc_feature (143)..(143): n is a, c, g, or t
  misc_feature (145)..(145): n is a, c, g, or t
  misc_feature (159)..(159): n is a, c, g, or t
  misc_feature (183)..(183): n is a, c, g, or t
  misc_feature (193)..(193): n is a, c, g, or t
  misc_feature (195)..(195): n is a, c, g, or t
  misc_feature (291)..(291): n is a, c, g, or t
  misc_feature (297)..(297): n is a, c, g, or t
  misc_feature (299)..(299): n is a, c, g, or t
  misc_feature (309)..(309): n is a, c, g, or t
  misc_feature (339)..(339): n is a, c, g, or t
  misc_feature (359)..(360): n is a, c, g, or t
  misc_feature (362)..(362): n is a, c, g, or t
  misc_feature (364)..(369): n is a, c, g, or t
  misc_feature (373)..(373): n is a, c, g, or t
  misc_feature (376)..(376): n is a, c, g, or t
  misc_feature (406)..(406): n is a, c, g, or t
  misc_feature (433)..(479): n is a, c, g, or t
  misc_feature (489)..(489): n is a, c, g, or t
  misc_feature (516)..(516): n is a, c, g, or t

SEQ ID NO: 3193 - DNA, 280 bp, Mus musculus
  misc_feature (60)..(110): n is a, c, g, or t
tggcgacccaatttctttggcgtctacacccgtgtcacacgtgtgatcaactggatccannnnnnnnnnnnnnnnnnnnnnnnnnnnnnnnnnnnnnnnnnnnnnnnnnnaagttcagggtgtccacccagccaggacacaagtattctggggcaagtgaccctgctaaggcctgtttccctcaggcctaccccagtgacagtacagagaaggatgtcagctggtggttaggatgcctcctgaggtccaggggccagcctcggctaggtttcacttctaa

SEQ ID NO: 3194 - DNA, 280 bp, Mus musculus; identical to SEQ ID NO: 3193
  misc_feature (60)..(110): n is a, c, g, or t

SEQ ID NO: 3195 - DNA, 310 bp, Mus musculus
  misc_feature (44)..(44): n is a, c, g, or t
  misc_feature (94)..(108): n is a, c, g, or t
aggttgcacactgtgatttcacaaccaaaagccaaaaggagccnggccaccccaggccttaggcaaccagccttcctcaaataggcttgctgannnnnnnnnnnnnnntccaagagccctgctctgcccctcgtggcatggatcctttccctggtgtggacttaagtctctggggaagaaaagtgggtggggctaccagcatcccagtttggaaagtagaggagtttgccaccagcagcttagaaactggaaatgctggtctctgccagcctcctcaggccaccctcatttatccccaaggagatgagaa

SEQ ID NO: 3196 - DNA, 310 bp, Mus musculus; identical to SEQ ID NO: 3195
  misc_feature (44)..(44): n is a, c, g, or t
  misc_feature (94)..(108): n is a, c, g, or t

SEQ ID NO: 3197 - DNA, 619 bp, Mus musculus
  misc_feature (26)..(27): n is a, c, g, or t
  misc_feature (29)..(31): n is a, c, g, or t
  misc_feature (33)..(35): n is a, c, g, or t
  misc_feature (37)..(37): n is a, c, g, or t
  misc_feature (39)..(40): n is a, c, g, or t
  misc_feature (143)..(144): n is a, c, g, or t
  misc_feature (151)..(151): n is a, c, g, or t
  misc_feature (153)..(153): n is a, c, g, or t
  misc_feature (158)..(158): n is a, c, g, or t
  misc_feature (160)..(161): n is a, c, g, or t
  misc_feature (167)..(167): n is a, c, g, or t
  misc_feature (360)..(363): n is a, c, g, or t
  misc_feature (365)..(367): n is a, c, g, or t
  misc_feature (372)..(373): n is a, c, g, or t
  misc_feature (426)..(426): n is a, c, g, or t
aagcagtagctggtaccttactcctnntnnngnnncnanncccaaatatacagaattcatttcaatgagattaggccctggacacaagcgactttgacccagagtgcttccccagagaagccctggtgtgctctactgggccnngcagggngnccccntnncctttnttttacagtctcagcaccagcagccatgttcttccttcatgagactcccggggtgaacaaatgggattggagacacagctatgagatgcttatcccttgaaaagctatgtggtatatctgtggttgtctgtgcctttgtgcttccattcccctgtcctttttgtaagatttagacttctgtgtgattttatannnnannnaaaannacttgtcctggcatcgcattgctgtgtgcatgagaggattgggagaaggctgntgtggcccaagaaataaccactgccccacccccccttgcttgttcgttggtcacttatatctcagtgggggtttctgggagagggctggtgaatgtccagatgtcaggtgttctgttagtaactgctgtgatttgaagttgttggtgttgttctgtgggaggacatcgccccctggtgctcatgaggtgtacg

SEQ ID NO: 3198 - DNA, 619 bp, Mus musculus; identical to SEQ ID NO: 3197
  misc_feature (26)..(27): n is a, c, g, or t
  misc_feature (29)..(31): n is a, c, g, or t
  misc_feature (33)..(35): n is a, c, g, or t
  misc_feature (37)..(37): n is a, c, g, or t
  misc_feature (39)..(40): n is a, c, g, or t
  misc_feature (143)..(144): n is a, c, g, or t
  misc_feature (151)..(151): n is a, c, g, or t
  misc_feature (153)..(153): n is a, c, g, or t
  misc_feature (158)..(158): n is a, c, g, or t
  misc_feature (160)..(161): n is a, c, g, or t
  misc_feature (167)..(167): n is a, c, g, or t
  misc_feature (360)..(363): n is a, c, g, or t
  misc_feature (365)..(367): n is a, c, g, or t
  misc_feature (372)..(373): n is a, c, g, or t
  misc_feature (426)..(426): n is a, c, g, or t

SEQ ID NO: 3199 - DNA, 418 bp, Mus musculus
  misc_feature (46)..(85): n is a, c, g, or t
  misc_feature (275)..(294): n is a, c, g, or t
gcgacagagcctttgtacacacaaggcccaaggtaggtgtaatccnnnnnnnnnnnnnnnnnnnnnnnnnnnnnnnnnnnnnnnntgtatcgaagtgatcacaatttcactcattagagaccttctgcagtgcaattgaactaaccccttctctctaatgaatgtatctgttcaccttgttccctctaaggataagctccaagtgattgctgctttcctggcaacttgactgagtttcactctcttcttttacttcctgttttaatgagtaactnnnnnnnnnnnnnnnnnnnnttctcaagtgatttagctgccattctgccattttgagttttgtttaattttatctgcttgagcacactgatcaaccactgacctgccttcttgcattgtcctgcagtgacgtaagagtgacatt

SEQ ID NO: 3200 - DNA, 418 bp, Mus musculus; identical to SEQ ID NO: 3199
  misc_feature (46)..(85): n is a, c, g, or t
  misc_feature (275)..(294): n is a, c, g, or t

SEQ ID NO: 3201 - DNA, 480 bp, Mus musculus
  misc_feature (190)..(200): n is a, c, g, or t
  misc_feature (202)..(205): n is a, c, g, or t
  misc_feature (213)..(213): n is a, c, g, or t
gaagcagttgttcaccaaccatattcttgcttcttttttctttcttctggagcctttcccctacatttaatttattttcttatacataataacatagcaatgctaaaatcactttaaatactttcaagcgccatccagtataaacaagaaaattaatgtaacattccaaataaataatctgtttttctannnnnnnnnnnannnntattcatncatttacttatcttccagtaaagcctcagagaagaatcaggccacactgggtagttccaaagactaccttctccaggactgctgaacatttcggggtttcaatgtcccaagcattaggatctaggtgggttttgccacatacagagttccaggaggaaagagctgaacctttcctgtgtgtaatacagatatcactgtttccgattttccatatagctccttcacagatacatttatgattgatgtgtaggctttctctgagtagac

SEQ ID NO: 3202 - DNA, 480 bp, Mus musculus; identical to SEQ ID NO: 3201
  misc_feature (190)..(200): n is a, c, g, or t
  misc_feature (202)..(205): n is a, c, g, or t
  misc_feature (213)..(213): n is a, c, g, or t

SEQ ID NO: 3203 - DNA, 600 bp, Mus musculus
  misc_feature (500)..(528): n is a, c, g, or t
cttcatagggatgtgtgagttacacacagttaaggactcttgatgttagagactttgggaaggtctgaaataggagaaaacttgcaatggagtatttacctaaaaggtttcaattctcaaaagaaaagtgaggatgcctaacgcaatcagtgaatctttttaaactattccaacatcatgaacaagatattaaattgtacctaaggatttgtatttctttaagtcttgttctaaatcatatctgtttaataaatgactagttaatatttgtgcatgttatttaataaagagttatatttttatagaaaacgtaagagtgaaagtgtgctccgtgtcttttacttaatgtcccactcctgtataattccgtgacacaccaatgtctacttgggcctccagcaagattgcagagatactcactgtatgaaaacagtgccggtcacatggtccgagttaagaggggtctcaaagatgacatgtgagtaggagacatgctgcannnnnnnnnnnnnnnnnnnnnnnnnnnnnacttgaaattctactgatctaagaaatggagtgcacactaagataatttccttttcttcctcagaaagtgag

SEQ ID NO: 3204 - DNA, 600 bp, Mus musculus; identical to SEQ ID NO: 3203
  misc_feature (500)..(528): n is a, c, g, or t

SEQ ID NO: 3205 - DNA, 447 bp, Mus musculus
  misc_feature (29)..(29): n is a, c, g, or t
  misc_feature (31)..(31): n is a, c, g, or t
  misc_feature (83)..(83): n is a, c, g, or t
  misc_feature (99)..(99): n is a, c, g, or t
  misc_feature (115)..(115): n is a, c, g, or t
  misc_feature (127)..(127): n is a, c, g, or t
  misc_feature (163)..(225): n is a, c, g, or t
  misc_feature (230)..(230): n is a, c, g, or t
  misc_feature (234)..(277): n is a, c, g, or t
  misc_feature (292)..(306): n is a, c, g, or t
  misc_feature (308)..(308): n is a, c, g, or t
  misc_feature (340)..(340): n is a, c, g, or t
ctatccactgtaaccactgcagggctggncntgatggttaagatgaaccgcttcagggtgggagatctgagagcaggatcacntgtgtgtcagagcctntccaaggtcgattcgntgggattatgcntgataaactgagagattcgtacacattagctttttnnnnnnnnnnnnnnnnnnnnnnnnnnnnnnnnnnnnnnnnnnnnnnnnnnnnnnnnnnnnnnnagcantagnnnnnnnnnnnnnnnnnnnnnnnnnnnnnnnnnnnnnnnnnnnntgtgtacttaatggnnnnnnnnnnnnnnncntgcctgcgcaactcaatgcgttaccaccccgngggaaatgctagccaaaattgcgctcttggtgaggaggagagataggagtgaggggcgattgtgtcgggatgtgaggaggtatcttctggatgtcctttggagactc

SEQ ID NO: 3206 - DNA, 447 bp, Mus musculus; identical to SEQ ID NO: 3205
  misc_feature (29)..(29): n is a, c, g, or t
  misc_feature (31)..(31): n is a, c, g, or t
  misc_feature (83)..(83): n is a, c, g, or t
  misc_feature (99)..(99): n is a, c, g, or t
  misc_feature (115)..(115): n is a, c, g, or t
  misc_feature (127)..(127): n is a, c, g, or t
  misc_feature (163)..(225): n is a, c, g, or t
  misc_feature (230)..(230): n is a, c, g, or t
  misc_feature (234)..(277): n is a, c, g, or t
  misc_feature (292)..(306): n is a, c, g, or t
  misc_feature (308)..(308): n is a, c, g, or t
  misc_feature (340)..(340): n is a, c, g, or t

SEQ ID NO: 3207 - DNA, 257 bp, Mus musculus
  misc_feature (98)..(112): n is a, c, g, or t
ccctggaaagcaggaagctgctaagtagtcctggcaagagcagcagcttcagatgtgacccttctgagattaatatatcagatgaaatgcctaaaacnnnnnnnnnnnnnnntctcagcataaattccggaaatacaaaagaaaaaagccccttcaactgagagtctctgctgagtggaagatttggaccatgaggtgcctcggagaagttctgggttttaacaaaatggcgagtctctccgggaagaagccgagct

SEQ ID NO: 3208 - DNA, 257 bp, Mus musculus; identical to SEQ ID NO: 3207
  misc_feature (98)..(112): n is a, c, g, or t

SEQ ID NO: 3209 - DNA, 455 bp, Mus musculus
  misc_feature (41)..(78): n is a, c, g, or t
  misc_feature (92)..(92): n is a, c, g, or t
  misc_feature (97)..(97): n is a, c, g, or t
gttgtcaggagatgggccccaaattaactgccagagcaggnnnnnnnnnnnnnnnnnnnnnnnnnnnnnnnnnnnnnntccagagctcttgngttgngtgtattgcaagcctggccagaactacttcaaaggcccctttacctaaaccattgtagaagccaggcctcccttgttgaagacatatttaatccccaaattcttccgtgatgggtgtttttcccagcaggagagggcactgatcagacagattttgttcctgcatcctgtacataatgttttgagtgtcaggtccagggatgagagaccgttgctcttcccattgtttctctcctggttttgtaaatgattctcaatcgacatatgagttcaatgagctgttggcttgaggcaggtgaagtttgcaactgtgctgatttaataggagtctcgtgttgtctgtcaaggtgccttcctct

SEQ ID NO: 3210 - DNA, 455 bp, Mus musculus; identical to SEQ ID NO: 3209
  misc_feature (41)..(78): n is a, c, g, or t
  misc_feature (92)..(92): n is a, c, g, or t
  misc_feature (97)..(97): n is a, c, g, or t

SEQ ID NO: 3211 - DNA, 426 bp, Mus musculus
  misc_feature (231)..(235): n is a, c, g, or t
  misc_feature (238)..(239): n is a, c, g, or t
  misc_feature (241)..(241): n is a, c, g, or t
  misc_feature (243)..(244): n is a, c, g, or t
  misc_feature (246)..(246): n is a, c, g, or t
  misc_feature (280)..(280): n is a, c, g, or t
  misc_feature (324)..(339): n is a, c, g, or t
gtgcacacgtatgagtgtgtacatgcccttccctgcggcctctttgtcacagacaagaattggaggctgtactgggtctcttaaccttctcctctccccagcatcctcggcccctatattttaattcttgatcatgtaggaattgtttttgataaatgttgatattattgttattattgttattattaataaagacaaaaaggattttgtttatttgtttaaaagagaaannnnnaannananncngtgctgttgaactgtggcttgcaacttctgtttngaagtgttttccttggctttggcatcgtgagccactctcctgtnnnnnnnnnnnnnnnngtggcctcccttccccagccgaagcagcacataggcagtggctactgtccttgtcacttcctttctctctgcagtcagaaaccaaag

SEQ ID NO: 3212 - DNA, 426 bp, Mus musculus; identical to SEQ ID NO: 3211
  misc_feature (231)..(235): n is a, c, g, or t
  misc_feature (238)..(239): n is a, c, g, or t
  misc_feature (241)..(241): n is a, c, g, or t
  misc_feature (243)..(244): n is a, c, g, or t
  misc_feature (246)..(246): n is a, c, g, or t
  misc_feature (280)..(280): n is a, c, g, or t
  misc_feature (324)..(339): n is a, c, g, or t

SEQ ID NO: 3213 - DNA, 115 bp, Mus musculus
  misc_feature (33)..(47): n is a, c, g, or t
ggcccggcttctcttctggtcttcaaaaccagnnnnnnnnnnnnnnngctctgactcccagccctcatttctgagagccaggggcaccaacctctgagtatgcacagaagaaagc

SEQ ID NO: 3214 - DNA, 115 bp, Mus musculus; identical to SEQ ID NO: 3213
  misc_feature (33)..(47): n is a, c, g, or t

SEQ ID NO: 3215 - DNA, 427 bp, Mus musculus
  misc_feature (113)..(128): n is a, c, g, or t
tgcaggcacagaggatgttcatgagcctggtggaggcatcttagcatcctagagagctcaccacttaaaagaccagtatcctttatcttctcaggtagaactgtccctgagtnnnnnnnnnnnnnnnncagggtagaaaagccaaaaactttaatttccaacatgagctatgtggtcatgaatacaatgccatgtgacccactccaactcagacgcaccccaaaccctccctccctggaggaccaggccgttcctgctccccaagaggacacagggaaaggtgggtagatgaagggaggctcccagcccaaggactctggggtcccatcttcctgtcaccttgcaggatggcacaaaggactcagaggtaacacctatgtctacttctagcctcccacccagcccacacaggctctcttgctgaaag

SEQ ID NO: 3216 - DNA, 427 bp, Mus musculus; identical to SEQ ID NO: 3215
  misc_feature (113)..(128): n is a, c, g, or t

SEQ ID NO: 3217 - DNA, 409 bp, Mus musculus
  misc_feature (163)..(163): n is a, c, g, or t
  misc_feature (342)..(342): n is a, c, g, or t
tcccgttgtgaatcctgatttaataaagacaaggaggcaggattctcttagtccctgtttgtctgggtccctgctctccctgttggttgggcctagctctgccttgtcccttcctggtgtctgtctgtcggtcttttttctttcctctcttctccccgtgggncagcatctgctgatggattctgttctgattgtgtgattgttgtaatttgtccttctgtgcgcaaaaggaagggcttcttgaatctcttccaagtgagattgtaaatgtagaactttccattgttggatctagattttttaaaatcctttttcttctctctctttcttttcttctttttnattttcaaaatttttaaaacaaatttttggggctattttttttttgtttgttccagagctgagacct

SEQ ID NO: 3218 - DNA, 409 bp, Mus musculus; identical to SEQ ID NO: 3217
  misc_feature (163)..(163): n is a, c, g, or t
  misc_feature (342)..(342): n is a, c, g, or t

SEQ ID NO: 3219 - DNA, 573 bp, Mus musculus
  misc_feature (183)..(208): n is a, c, g, or t
  misc_feature (266)..(266): n is a, c, g, or t
  misc_feature (272)..(272): n is a, c, g, or t
  misc_feature (390)..(433): n is a, c, g, or t
atggcttgcttaagcaataactttttaatgggtgtgaatgactaattcacacagactattgcacattggggcatcaggggcaataattatgctgaagtgggcgctatcctcgtgtcacaggagccacactaactcaatctcaaagacttaaacatttaactttagctaggcatggtggtgcannnnnnnnnnnnnnnnnnnnnnnnnnctgagtatgaaggtcaggctagtctgggttacaatgtatgatctatctttaaaaaaanaaaaanaaaaattctctttagatcctctggcttttctaatcaggatttttatatgctcccgtgctcctcttaatttttgtgtcagctttaattatgaaaatgaaagctcatttataaacagcannnnnnnnnnnnnnnnnnnnnnnnnnnnnnnnnnnnnnnnnnnntgacctaggtgcatctgagactgccatgcaagggcaggctcctctgctgttcttgacgactccctgctaaaccatctgtcaagtactgtcctcctacctgaactgcacagcacgtgcatcttaatagctgatgctctggg

SEQ ID NO: 3220 - DNA, 573 bp, Mus musculus; identical to SEQ ID NO: 3219
  misc_feature (183)..(208): n is a, c, g, or t
  misc_feature (266)..(266): n is a, c, g, or t
  misc_feature (272)..(272): n is a, c, g, or t
  misc_feature (390)..(433): n is a, c, g, or t

SEQ ID NO: 3221 - DNA, 171 bp, Mus musculus
tgttcatatccgaaatccaggtattaatcgtgtagtccaaaaaacttgaagaaaggcaaaatagcttatatgatgatatacaaatactggtttctagagtagaaattgatttttttaaaaaaaatagatattctaaaatagagattcaggcagctgaatcgggacaatata

SEQ ID NO: 3222 - DNA, 171 bp, Mus musculus; identical to SEQ ID NO: 3221

SEQ ID NO: 3223 - DNA, 354 bp, Mus musculus
  misc_feature (97)..(98): n is a, c, g, or t
  misc_feature (265)..(279): n is a, c, g, or t
  misc_feature (287)..(287): n is a, c, g, or t
  misc_feature (316)..(316): n is a, c, g, or t
tccaggtttcacactggctccagggaggggcagaggctctgcgggggtggggcagtttttgaaatgtaaatttagaacttttaaaaaagatgcgcannttctgatcaatttctatgagacttaatctaatcatgtctggctccggccctcttccctgtgagccgtccgtcctctgttggttctctctcccgccatcttgtcctcccctctgtttttcatgacaagcatacagacttgaacacccctgggtgctgtcaagaactgnnnnnnnnnnnnnnntccaaatntaccaaaaaaagaagtcaccctccatgtntaaaaaaactgtcgcttctcctcggaaacttgagactc

SEQ ID NO: 3224 - DNA, 354 bp, Mus musculus; identical to SEQ ID NO: 3223
  misc_feature (97)..(98): n is a, c, g, or t
  misc_feature (265)..(279): n is a, c, g, or t
  misc_feature (287)..(287): n is a, c, g, or t
  misc_feature (316)..(316): n is a, c, g, or t

SEQ ID NO: 3225 - DNA, 130 bp, Mus musculus
tttgctttaaggtgtaggctttcctacttgctttgcagaagttagcctagaaatgaggaaggccagaggaagggtgagaaagtggtagtgaactactccgcggcctgtcgtgaccagactggaagctatg

SEQ ID NO: 3226 - DNA, 130 bp, Mus musculus; identical to SEQ ID NO: 3225

SEQ ID NO: 3227 - DNA, 421 bp, Mus musculus
  misc_feature (177)..(191): n is a, c, g, or t
cgaaggtcagtgaccctggtatgacatgtggtgaaacatgaaagaagtaagcgtctgaaggggtccaggaaagtttggggaaaaagaggaccgggaaacccgtgctctatggtgtacaatgaataccttttattccatcctctcccacccctaccagattcctcaaccaaaaccagnnnnnnnnnnnnnnnacaggaacaagttctcccgctgtttggctatgcaactgttcgttttgcttactctgccctccgtcaaccctttccgcaaatgtagttgcagacaaatgctttctttctgttgttcgctctgtgtggggtgtgtaaataacctaaaatgtacattgaatttcacagtgtaaagttttattttattccttgtattatagtatgcgaaaacatcccgatgtacatgaagtgca

SEQ ID NO: 3228 - DNA, 421 bp, Mus musculus; identical to SEQ ID NO: 3227
  misc_feature (177)..(191): n is a, c, g, or t

SEQ ID NO: 3229 - DNA, 310 bp, Mus musculus
  misc_feature (39)..(40): n is a, c, g, or t
  misc_feature (43)..(45): n is a, c, g, or t
  misc_feature (50)..(52): n is a, c, g, or t
  misc_feature (203)..(222): n is a, c, g, or t
tgtagtcccccgaggccatgtcaggagacgcagccgcgnncannnagcgnnnatatgtcccagagaaggtgaagaaagcggaaaagaaattagaagaaaatccatatgaccttgatgcttggagcattctcattcgagaggcacagaatcaacctatagacaaagcacggaagacttacgaacgccttgttgcccagttcccnnnnnnnnnnnnnnnnnnnnaactgtacattgaagcagaggttaatattttatttattttttcttatatagcatctgatggcaattacagcttacactatagtgacag

SEQ ID NO: 3230 - DNA, 310 bp, Mus musculus; identical to SEQ ID NO: 3229
  misc_feature (39)..(40): n is a, c, g, or t
  misc_feature (43)..(45): n is a, c, g, or t
  misc_feature (50)..(52): n is a, c, g, or t
  misc_feature (203)..(222): n is a, c, g, or t

SEQ ID NO: 3231 - DNA, 537 bp, Mus musculus
  misc_feature (146)..(146): n is a, c, g, or t
  misc_feature (184)..(216): n is a, c, g, or t
  misc_feature (348)..(348): n is a, c, g, or t
  misc_feature (358)..(358): n is a, c, g, or t
  misc_feature (367)..(367): n is a, c, g, or t
  misc_feature (386)..(386): n is a, c, g, or t
  misc_feature (408)..(428): n is a, c, g, or t
  misc_feature (455)..(455): n is a, c, g, or t
  misc_feature (481)..(481): n is a, c, g, or t
  misc_feature (512)..(512): n is a, c, g, or t
cgtctgtgacacttttgtacactgatttgccactcatggcactgagcagacatccatccctactcagtgaaaaaccagtcaaaagcaaaagtcctttgaagcagaagttgatgctttggaaaactcttgacttattttggtgtcancattatgttagatttgaaagcattcttcgtgtatttgnnnnnnnnnnnnnnnnnnnnnnnnnnnnnnnnngtgttcagttatttcttctgggacatggaaagcctgtcccccatccttcttctgaagccgagtctgctgtgtactgttaccctcgagggagcgcagggctcttctgagagccggtctctgaactgctgcttntgggacatgnttccccacntcctccagtctacctcccntcttggggtgtttttgtaatgnnnnnnnnnnnnnnnnnnnnntccctttgattgtaatgaagtgggttntgcagccaccttttggaaataaatgntccttaaattgtgtacttagcattttgaatnttagcctcaggtgtttctgctgttg

SEQ ID NO: 3232 - DNA, 537 bp, Mus musculus; identical to SEQ ID NO: 3231
  misc_feature (146)..(146): n is a, c, g, or t
  misc_feature (184)..(216): n is a, c, g, or t
  misc_feature (348)..(348): n is a, c, g, or t
  misc_feature (358)..(358): n is a, c, g, or t
  misc_feature (367)..(367): n is a, c, g, or t
  misc_feature (386)..(386): n is a, c, g, or t
  misc_feature (408)..(428): n is a, c, g, or t
  misc_feature (455)..(455): n is a, c, g, or t
  misc_feature (481)..(481): n is a, c, g, or t
  misc_feature (512)..(512): n is a, c, g, or t

SEQ ID NO: 3233 - DNA, 508 bp, Mus musculus
  misc_feature (261)..(294): n is a, c, g, or t
  misc_feature (463)..(477): n is a, c, g, or t
gatggaactggtgcatgtcttcccccgacagctcttgggctacctgcaggatcttctgtctgacaccatccagcttactttctgattcagtcagtatctcctccatatcaggagcacttgtaatcctatggagaagaaaaattgtcctcttactctccacagtaatatcccggcttagcttcacgagtctctcatatttgtcgtgcctggcgtccagctcctgctgaaatgatttgaaggccagcatcaccggcgaagacnnnnnnnnnnnnnnnnnnnnnnnnnnnnnnnnnngtgggaaggtgtcatgcttcctcttcctgaaccctcctggtccttctttgccgttcatggccgcggggcctcggcttgcacgcgcagggatcgcagccgccgggccagctcagcgaaaggccgtcgcgggacgccgcgctgagcccgtgggtgacagcgcacaccaccnnnnnnnnnnnnnnnggccgccggaagcggatccttcacgcagcct

SEQ ID NO: 3234 - DNA, 508 bp, Mus musculus; identical to SEQ ID NO: 3233
  misc_feature (261)..(294): n is a, c, g, or t
  misc_feature (463)..(477): n is a, c, g, or t

SEQ ID NO: 3235 - DNA, 453 bp, Mus musculus
  misc_feature (170)..(170): n is a, c, g, or t
  misc_feature (394)..(394): n is a, c, g, or t
gcccagtcatgcagggatggtgctagatgtgtctctggtcttctgtgcacctgctgtcagagagccatccacacagttggacactccttctgagtggtccatgatgctgatcagtcagccgctgcccgcccctgcacctgcctgccatccctgtaccaccctcccccccnttcccaaagaacacacagggtcacgtgggacacttgaacgtcaaggggcatgagtaacccatagactctgtttgctccagctgtattacacatcagtgtttcacttactggatggattaaaaaaaagttgttttttttaaatttaatgcagatattattcaccaggaacaacttctcagcactttacaaaggactaaaatgctaacttttaacttagccaaatntttttctaaattgcacatatacccaagctttttcaaactgttagctgctatcttatttg

SEQ ID NO: 3236 - DNA, 453 bp, Mus musculus; identical to SEQ ID NO: 3235
  misc_feature (170)..(170): n is a, c, g, or t
  misc_feature (394)..(394): n is a, c, g, or t

SEQ ID NO: 3237 - DNA, 344 bp, Mus musculus
  misc_feature (117)..(117): n is a, c, g, or t
  misc_feature (299)..(316): n is a, c, g, or t
gccggcttccaaggacagcaatatgtgctggagaggggcgattacccgggctgggatgcctggggtggcaacacagcctaccctgcggagaggctcacctccttccggcctgtggcntgcgctaaccaccgcgactcaaggctgaccatcttcgagcaggagaacttcctgggcaggaaaggcgagctgaacgatgactatccctctctgcaggccatgggctgggacggcactgaagtgggctccttccatgttcaatctggggcgtgggtttgttcccagtttcctggctaccgagnnnnnnnnnnnnnnnnnnagagcgatcaccactcaggtgactacaa

SEQ ID NO: 3238 - DNA, 344 bp, Mus musculus; identical to SEQ ID NO: 3237
  misc_feature (117)..(117): n is a, c, g, or t
  misc_feature (299)..(316): n is a, c, g, or t

SEQ ID NO: 3239 - DNA, 369 bp, Mus musculus
ggacaaaaccctgtctcctaacccaagtgagtcgggaggaaggcacccagctctgctgcttcttgggaccacccagcagcacactgtgttctacagagaacaggcccagcacctaccatgctcacttctccatggaccagagaaaccccgtgaagagccgaggaaggcttgtgaaccttgttaaaacttaaaagcaataacttcactggcatgctccagtctcccatgtgattgaggagttctgacctcagtctctccgtctgcacaatgggcttgctggcctctcagggattttgaagacataatgaggaatttttattcagaataatcactgttgaaataatgtttcaggcatttctagttcttccc

SEQ ID NO: 3240 - DNA, 429 bp, Mus musculus
  misc_feature (26)..(34): n is a, c, g, or t
  misc_feature (36)..(38): n is a, c, g, or t
ccctctgcgcaactcctgaagaatannnnnnnnncnnncgcatttcatcagcaatccacaggacaaaaccctgtctcctaacccaagtgagtcgggaggaaggcacccagctctgctgcttcttgggaccacccagcagcacactgtgttctacagagaacaggcccagcacctaccatgctcacttctccatggaccagagaaaccccgtgaagagccgaggaaggcttgtgaaccttgttaaaacttaaaagcaataacttcactggcatgctccagtctcccatgtgattgaggagttctgacctcagtctctccgtctgcacaatgggcttgctggcctctcagggattttgaagacataatgaggaatttttattcagaataatcactgttgaaataatgtttcaggcatttctagttcttccc

SEQ ID NO: 3241 - DNA, 587 bp, Mus musculus
  misc_feature (357)..(357): n is a, c, g, or t
  misc_feature (359)..(359): n is a, c, g, or t
  misc_feature (361)..(364): n is a, c, g, or t
  misc_feature (366)..(368): n is a, c, g, or t
  misc_feature (408)..(408): n is a, c, g, or t
  misc_feature (411)..(411): n is a, c, g, or t
  misc_feature (413)..(415): n is a, c, g, or t
  misc_feature (418)..(418): n is a, c, g, or t
gctctgtggttccttttactggaaaatactgtcatgatggtattaaattttagactatagaacttcaaaaccctatcaaagggaagtaactatgaaatcagttgaaagtcagcctgtgtgtatccgatgtctatactaactcatgtttaaaaaggaataatgaaaaatcaagaacaagtcttcagtttcagttgaactgttcagccttttcaagatttcttttgtaaatgaatacatttaatgaatgtacattctctttgttgactttgatgattttaaacttaaagtgatatatttctatctggaatatgtttccacttgaaaagaaatcttaaaaaacaaagattaaagtgaaananannnnannnatttttacttgggaagctacagtatgatttggggggatgngtntnnntcnacatagttacagtgtaacttgaacctcctctaagtctgactatgattcttattttatatgcgataagattttgagtcttctatttgtacacatgtcaacttgggacttcttatcttccattatccctaaataatgataaattcccaggcaccaaagaacacatttgctt

SEQ ID NO: 3242 - DNA, 587 bp, Mus musculus; identical to SEQ ID NO: 3241
  misc_feature (357)..(357): n is a, c, g, or t
  misc_feature (359)..(359): n is a, c, g, or t
  misc_feature (361)..(364): n is a, c, g, or t
  misc_feature (366)..(368): n is a, c, g, or t
  misc_feature (408)..(408): n is a, c, g, or t
  misc_feature (411)..(411): n is a, c, g, or t
  misc_feature (413)..(415): n is a, c, g, or t
  misc_feature (418)..(418): n is a, c, g, or t

SEQ ID NO: 3243 - DNA, 519 bp, Mus musculus
cttcagtttcttagaaaatacaggagaaagctgtgtgactatggacattgtggtggagctcttaggtattacactggacagtgaccactcatgctggaaggaaaccctctggatggaaatagcgtggccaaaaggccacacctcgcactgttctgttgtcgaaaggatttcaatcctaacccggagtttctaccccacctttgctattcccggatgaaagatacatacaacctttatatttatagtaagccttaagcaacacaagagctgggcagatactactctctatattgttggaatctactttcctagctataagccagagttattgcttactacttactatgtttcatctgggctgttcttaactccaatcggccagccctcagggctacattcttctgactcctaacccgtggcggcttctccttccttctcctgcacccttatttctcctcatggtccctctctaatcttaagcccacaaaaccaatgtctcttttgtccaactgttaactg

SEQ ID NO: 3244 - DNA, 519 bp, Mus musculus; identical to SEQ ID NO: 3243

SEQ ID NO: 3245 - DNA, 434 bp, Mus musculus
  misc_feature (35)..(35): n is a, c, g, or t
  misc_feature (75)..(75): n is a, c, g, or t
  misc_feature (77)..(77): n is a, c, g, or t
  misc_feature (186)..(186): n is a, c, g, or t
  misc_feature (229)..(229): n is a, c, g, or t
  misc_feature (271)..(271): n is a, c, g, or t
  misc_feature (273)..(273): n is a, c, g, or t
  misc_feature (279)..(283): n is a, c, g, or t
  misc_feature (285)..(289): n is a, c, g, or t
  misc_feature (291)..(294): n is a, c, g, or t
  misc_feature (296)..(296): n is a, c, g, or t
gtgatactctgttggccggtacctactgggctccntcagccctatacctgtggggctccccagcctgtacctggntnttccctgacctgtgtggtttgaccttataaagaagcatcctgagaagccctgaagacacagtgtgcctgacttgaggtcagatagcttccgatgcaggcgcccttggtntgaccagaagtgagggaggaagacaagtggtatagggactttntcttgaccctgattttattaaatattttttcattctggaaananaaaaannnnnannnnnannnnanccttggcatttctccattctttttgttttatctgagctctgtcaccattattacatctgctactaatggctaggaacctcatggggagggcaggaaaagcacatcgccacatgcaagccttttcctgaaggccttcca

SEQ ID NO: 3246 - DNA, 434 bp, Mus musculus; identical to SEQ ID NO: 3245
  misc_feature (35)..(35): n is a, c, g, or t
  misc_feature (75)..(75): n is a, c, g, or t
  misc_feature (77)..(77): n is a, c, g, or t
  misc_feature (186)..(186): n is a, c, g, or t
  misc_feature (229)..(229): n is a, c, g, or t
  misc_feature (271)..(271): n is a, c, g, or t
  misc_feature (273)..(273): n is a, c, g, or t
  misc_feature (279)..(283): n is a, c, g, or t
  misc_feature (285)..(289): n is a, c, g, or t
  misc_feature (291)..(294): n is a, c, g, or t
  misc_feature (296)..(296): n is a, c, g, or t

SEQ ID NO: 3247 - DNA, 294 bp, Mus musculus
  misc_feature (85)..(85): n is a, c, g, or t
  misc_feature (87)..(87): n is a, c, g, or t
ccacatagcgtttgcctcccaggaaaacaatacgctcagagtcgtgtataaggttgacataacaaagaatggagagcactttgcnantggggaaacgaaattattcatctcccatggcagcaagatttcaaactccacactgataccagatgtcaagctcataaggtctgaacacagtgtggtgcctcctgaggctaaggaagaagtagaaggcattttgtctgaagtaggaaaggcggcctggtccaacttcaatggaacgtataaaaaaatgaacattcctgaaggtgtgtc

SEQ ID NO: 3248 - DNA, 294 bp, Mus musculus; identical to SEQ ID NO: 3247
  misc_feature (85)..(85): n is a, c, g, or t
  misc_feature (87)..(87): n is a, c, g, or t

SEQ ID NO: 3249 - DNA, 176 bp, Mus musculus
  misc_feature (95)..(95): n is a, c, g, or t
  misc_feature (97)..(102): n is a, c, g, or t
  misc_feature (104)..(105): n is a, c, g, or t
  misc_feature (109)..(109): n is a, c, g, or t
gtaaaggcagaccttcccatcaccacttagtgccaggttgtatactctagaggctactctgaggggactgcagtgtggtgcctgtttataatcangnnnnnncnngttntttaccctgagtggcaaacgttacaaaacactaaaaaccactgtagtctcattagtttagactcaat

SEQ ID NO: 3250 - DNA, 176 bp, Mus musculus; identical to SEQ ID NO: 3249
  misc_feature (95)..(95): n is a, c, g, or t
  misc_feature (97)..(102): n is a, c, g, or t
  misc_feature (104)..(105): n is a, c, g, or t
  misc_feature (109)..(109): n is a, c, g, or t

SEQ ID NO: 3251 - DNA, 369 bp, Mus musculus
  misc_feature (92)..(115): n is a, c, g, or t
  misc_feature (117)..(124): n is a, c, g, or t
  misc_feature (165)..(165): n is a, c, g, or t
  misc_feature (167)..(167): n is a, c, g, or t
  misc_feature (174)..(174): n is a, c, g, or t
  misc_feature (176)..(176): n is a, c, g, or t
  misc_feature (198)..(198): n is a, c, g, or t
  misc_feature (200)..(208): n is a, c, g, or t
  misc_feature (211)..(214): n is a, c, g, or t
  misc_feature (218)..(220): n is a, c, g, or t
  misc_feature (222)..(223): n is a, c, g, or t
  misc_feature (225)..(225): n is a, c, g, or t
  misc_feature (228)..(228): n is a, c, g, or t
  misc_feature (232)..(232): n is a, c, g, or t
  misc_feature (236)..(239): n is a, c, g, or t
  misc_feature (241)..(241): n is a, c, g, or t
  misc_feature (244)..(244): n is a, c, g, or t
  misc_feature (246)..(247): n is a, c, g, or t
  misc_feature (251)..(252): n is a, c, g, or t
  misc_feature (254)..(254): n is a, c, g, or t
  misc_feature (267)..(267): n is a, c, g, or t
  misc_feature (284)..(284): n is a, c, g, or t
  misc_feature (286)..(286): n is a, c, g, or t
  misc_feature (290)..(290): n is a, c, g, or t
  misc_feature (292)..(292): n is a, c, g, or t
  misc_feature (309)..(310): n is a, c, g, or t
  misc_feature (325)..(325): n is a, c, g, or t
  misc_feature (328)..(328): n is a, c, g, or t
  misc_feature (330)..(330): n is a, c, g, or t
  misc_feature (334)..(334): n is a, c, g, or t
atgctgaccctgcagaaccacactttcacagagaacatcaaaccttttaccacctacctggtgtgggtccgctgtatatttaacggagcctnnnnnnnnnnnnnnnnnnnnnnnngnnnnnnnncacgtagccagcagaccatggccaggcctctggagggcacntntcgcagntnagctttcccaggtccacagttntnnnnnnnnntgnnnngatnnntnntntanttantgannnngnttncnnctanncntgcttcccgagtntgctttttgcagatttntntagntntgaagaggtggtgcctnncagggcccggggatntgntnttgntaataaccatgctgtttcctgctttggccttggtg

SEQ ID NO: 3252 - DNA, 369 bp, Mus musculus; identical to SEQ ID NO: 3251
  misc_feature (92)..(115): n is a, c, g, or t
  misc_feature (117)..(124): n is a, c, g, or t
  misc_feature (165)..(165): n is a, c, g, or t
  misc_feature (167)..(167): n is a, c, g, or t
  misc_feature (174)..(174): n is a, c, g, or t
  misc_feature (176)..(176): n is a, c, g, or t
  misc_feature (198)..(198): n is a, c, g, or t
  misc_feature (200)..(208): n is a, c, g, or t
  misc_feature (211)..(214): n is a, c, g, or t
  misc_feature (218)..(220): n is a, c, g, or t
  misc_feature (222)..(223): n is a, c, g, or t
  misc_feature (225)..(225): n is a, c, g, or t
  misc_feature (228)..(228): n is a, c, g, or t
  misc_feature (232)..(232): n is a, c, g, or t
  misc_feature (236)..(239): n is a, c, g, or t
  misc_feature (241)..(241): n is a, c, g, or t
  misc_feature (244)..(244): n is a, c, g, or t
  misc_feature (246)..(247): n is a, c, g, or t
  misc_feature (251)..(252): n is a, c, g, or t
  misc_feature (254)..(254): n is a, c, g, or t
  misc_feature (267)..(267): n is a, c, g, or t
  misc_feature (284)..(284): n is a, c, g, or t
  misc_feature (286)..(286): n is a, c, g, or t
  misc_feature (290)..(290): n is a, c, g, or t
  misc_feature (292)..(292): n is a, c, g, or t
  misc_feature (309)..(310): n is a, c, g, or t
  misc_feature (325)..(325): n is a, c, g, or t
  misc_feature (328)..(328): n is a, c, g, or t
  misc_feature (330)..(330): n is a, c, g, or t
  misc_feature (334)..(334): n is a, c, g, or t

SEQ ID NO: 3253 - DNA, 491 bp, Mus musculus
  misc_feature (177)..(177): n is a, c, g, or t
  misc_feature (350)..(374): n is a, c, g, or t
tcttggcaccactcgcccaagttatatccaccagattattttgagcctcactgagttgttttgctactcagtcccttcagtcttcacagtgtttctcttgtaccagtatgagtatcaccgtgcataatgggattccaagtcttgaatgaaggcatgcattttacatagacgtctctntgaaataacctttgttgtaagtggtgtttccagtcaaagcagtaagttggtaaggtttagtcttgggtgaaatgtggatctgagtaataagtagcttctgctacttatcaggttattgttggttaaaatgtagattttgaagataaaaatagatcttttgtcatgactcactnnnnnnnnnnnnnnnnnnnnnnnnntgttagcttttgaatgccttttggtttggacttgccaacctatactgtctttgctgaaatgcccttataaatgtatacagctggtatgtaacaatgtgaagattccttacctgactt

SEQ ID NO: 3254 - DNA, 491 bp, Mus musculus; identical to SEQ ID NO: 3253
  misc_feature (177)..(177): n is a, c, g, or t
  misc_feature (350)..(374): n is a, c, g, or t

SEQ ID NO: 3255 - DNA, 384 bp, Mus musculus
  misc_feature (43)..(58): n is a, c, g, or t
  misc_feature (237)..(237): n is a, c, g, or t
  misc_feature (300)..(300): n is a, c, g, or t
  misc_feature (322)..(322): n is a, c, g, or t
  misc_feature (332)..(346): n is a, c, g, or t
gcctaagtagtccttttgtaatttgtatattacattgtggcannnnnnnnnnnnnnnncatattttagttaatcgttaatatactgtggtagatcagattgggagtatgtagcaaactggactttaaaaaactggaaagaggttttactaaaagaaaaatattattgaaaactttcaaattcatctctttttatatgtccgaaaacggccgagcttttcagcagtggctggcttggncgactctgccgtccctggcagagcgttgttactgttgctccttagcagctgctgcctggtgcntaggcctctgcagcacatgtgntgggaaggannnnnnnnnnnnnnngagacaatgcttacttgtcactaatcagaccttgagtt

SEQ ID NO: 3256 - DNA, 384 bp, Mus musculus; identical to SEQ ID NO: 3255
  misc_feature (43)..(58): n is a, c, g, or t
  misc_feature (237)..(237): n is a, c, g, or t
  misc_feature (300)..(300): n is a, c, g, or t
  misc_feature (322)..(322): n is a, c, g, or t
  misc_feature (332)..(346): n is a, c, g, or t

SEQ ID NO: 3257 - DNA, 378 bp, Mus musculus
  misc_feature (102)..(121): n is a, c, g, or t
  misc_feature (149)..(169): n is a, c, g, or t
cttcgggtgacacagagaagaatattcataagcttcatgttttgaatacttgtctgaaacttgatgaaagtacttacaaatctgtgcacataccgttgccannnnnnnnnnnnnnnnnnnnacagccaaacgagaagcttgcagaggtnnnnnnnnnnnnnnnnnnnnnggaaggacgcttctcgagaaatgtgccattgccacataattatcacattgattttgaaatcagaatggatactaacaggacccaagtattttcattttctgatgtagatgcaagttctgccacaaacatgcagagagtagcagtgctgtgtgttcctaagtctgtttactgtttaaattcatgccaccccagaggattgatggccatga

SEQ ID NO: 3258 - DNA, 378 bp, Mus musculus; identical to SEQ ID NO: 3257
  misc_feature (102)..(121): n is a, c, g, or t
  misc_feature (149)..(169): n is a, c, g, or t

SEQ ID NO: 3259 - DNA, 536 bp, Mus musculus
  misc_feature (42)..(42): n is a, c, g, or t
  misc_feature (384)..(384): n is a, c, g, or t
  misc_feature (436)..(436): n is a, c, g, or t
  misc_feature (459)..(459): n is a, c, g, or t
  misc_feature (494)..(508): n is a, c, g, or t
gttggcttttcaaacagacatcaccacattcttatcagttanactttgggggagcttcctatcaccccctgttgccagggggtctttcaagtttgagtcagtccatccagagagggacgagtaagttcaggcactgtggggcattggtgaggtcatatggagaacgaacacctatagaactgttgaacaaccatgcaagtcttccctgtccttggctatcactggctacctttttaagtgtataccagagccgtacactccaatggttagtaagtcataacttctcttcagatttttttcccaatagtgtaactattgagggtcagggtcaggtcttctgatggttacgaagctagcctttcatcctggggagcttgcaggaantccgaggctaagccactgaagcaagaactgactttcctagatatatgttcanatggactgtgctactgctgtgtntcaaagctaccagtgtgtgcaataagtggaagggnnnnnnnnnnnnnnnaataaatgctaaatgacattcgagttca

SEQ ID NO: 3260 - DNA, 536 bp, Mus musculus; identical to SEQ ID NO: 3259
  misc_feature (42)..(42): n is a, c, g, or t
  misc_feature (384)..(384): n is a, c, g, or t
  misc_feature (436)..(436): n is a, c, g, or t
  misc_feature (459)..(459): n is a, c, g, or t
  misc_feature (494)..(508): n is a, c, g, or t

SEQ ID NO: 3261 - DNA, 196 bp, Mus musculus
  misc_feature (55)..(55): n is a, c, g, or t
  misc_feature (106)..(106): n is a, c, g, or t
tgtagctattctttgaccaaactgtggatactgttaatattaatttatatttgtntctttttgtatgtatgtatggcgtgtttgtgagtatgtatggtttataatntgatgagtcatgaagctcagtttggctgtaatttaattccccttcccttatttttatttatttttgtactgtgctgattcaataaaatgc

SEQ ID NO: 3262 - DNA, 196 bp, Mus musculus; identical to SEQ ID NO: 3261
  misc_feature (55)..(55): n is a, c, g, or t
  misc_feature (106)..(106): n is a, c, g, or t

SEQ ID NO: 3263 - DNA, 363 bp, Mus musculus
  misc_feature (227)..(227): n is a, c, g, or t
  misc_feature (230)..(233): n is a, c, g, or t
  misc_feature (235)..(235): n is a, c, g, or t
  misc_feature (242)..(242): n is a, c, g, or t
  misc_feature (246)..(246): n is a, c, g, or t
  misc_feature (249)..(249): n is a, c, g, or t
  misc_feature (251)..(251): n is a, c, g, or t
  misc_feature (253)..(254): n is a, c, g, or t
  misc_feature (256)..(256): n is a, c, g, or t
  misc_feature (263)..(263): n is a, c, g, or t
  misc_feature (266)..(266): n is a, c, g, or t
  misc_feature (268)..(268): n is a, c, g, or t
  misc_feature (277)..(277): n is a, c, g, or t
  misc_feature (302)..(302): n is a, c, g, or t
ctatcctgtgggtttcagaggaaggggcaagtcacatggtcagtctctctctgatttgtgggtagcagagggagggaagagcattctagagtaggaatttgggactctgaggatttgaggggtcgggaggaaagggcacttctagttgaggtgtatccattatacatctgtaggatgtgtcaccacgagtagcccctctagtatcccagtctggtgtctggtgggcngannnntnagcacangtantcntntnntntccctgnaantngcaacttantccaaggacacacacacacacacantcccacccctcagagcccatgagcctgtaaacaaactccccaggtgcctaaattccaggag

SEQ ID NO: 3264 - DNA, 363 bp, Mus musculus; identical to SEQ ID NO: 3263
  misc_feature (227)..(227): n is a, c, g, or t
  misc_feature (230)..(233): n is a, c, g, or t
  misc_feature (235)..(235): n is a, c, g, or t
  misc_feature (242)..(242): n is a, c, g, or t
  misc_feature (246)..(246): n is a, c, g, or t
  misc_feature (249)..(249): n is a, c, g, or t
  misc_feature (251)..(251): n is a, c, g, or t
  misc_feature (253)..(254): n is a, c, g, or t
  misc_feature (256)..(256): n is a, c, g, or t
  misc_feature (263)..(263): n is a, c, g, or t
  misc_feature (266)..(266): n is a, c, g, or t
  misc_feature (268)..(268): n is a, c, g, or t
  misc_feature (277)..(277): n is a, c, g, or t
  misc_feature (302)..(302): n is a, c, g, or t

SEQ ID NO: 3265 - DNA, 494 bp, Mus musculus
  misc_feature (102)..(102): n is a, c, g, or t
  misc_feature (104)..(104): n is a, c, g, or t
  misc_feature (111)..(111): n is a, c, g, or t
  misc_feature (115)..(115): n is a, c, g, or t
  misc_feature (126)..(126): n is a, c, g, or t
  misc_feature (146)..(146): n is a, c, g, or t
  misc_feature (161)..(161): n is a, c, g, or t
  misc_feature (169)..(169): n is a, c, g, or t
  misc_feature (301)..(301): n is a, c, g, or t
  misc_feature (350)..(350): n is a, c, g, or t
  misc_feature (365)..(365): n is a, c, g, or t
  misc_feature (367)..(367): n is a, c, g, or t
  misc_feature (373)..(373): n is a, c, g, or t
  misc_feature (396)..(396): n is a, c, g, or t
  misc_feature (469)..(469): n is a, c, g, or t
actttaccagtatgtgaatactgtaaaagccatagtcttataggtcattatgatacatattttaatacattttgaaataaaaattggcaggtaaagattttngntttaaangggnccatcatattngaaaagaaaacctcctgganccttggagggccccnagtgatangaataatactgtggtatgagatatcccgagtctcatcctaacatgctcagtagttgggcattctagcccagtctaccctgtagtggtcataggttctgccaagatctctgggtccatgtccagtttggaggntccaacatttcagtgctttttgagtttctcatttttataaaaagttatntcataagggagtcantnttcacnttggggctttcccagggaaactntcatcactggtaacaaactgtaactttaaagggcatgttgttgctgttattgttttgcctttttttttttttnaatataagtgtgcttgggaactcct

SEQ ID NO: 3266 - DNA, 494 bp, Mus musculus; identical to SEQ ID NO: 3265
  misc_feature (102)..(102): n is a, c, g, or t
  misc_feature (104)..(104): n is a, c, g, or t
  misc_feature (111)..(111): n is a, c, g, or t
  misc_feature (115)..(115): n is a, c, g, or t
  misc_feature (126)..(126): n is a, c, g, or t
  misc_feature (146)..(146): n is a, c, g, or t
  misc_feature (161)..(161): n is a, c, g, or t
  misc_feature (169)..(169): n is a, c, g, or t
  misc_feature (301)..(301): n is a, c, g, or t
  misc_feature (350)..(350): n is a, c, g, or t
  misc_feature (365)..(365): n is a, c, g, or t
  misc_feature (367)..(367): n is a, c, g, or t
  misc_feature (373)..(373): n is a, c, g, or t
  misc_feature (396)..(396): n is a, c, g, or t
  misc_feature (469)..(469): n is a, c, g, or t

SEQ ID NO: 3267 - DNA, 372 bp, Mus musculus
  misc_feature (88)..(88): n is a, c, g, or t
  misc_feature (224)..(224): n is a, c, g, or t
  misc_feature (242)..(242): n is a, c, g, or t
  misc_feature (245)..(245): n is a, c, g, or t
  misc_feature (258)..(258): n is a, c, g, or t
  misc_feature (260)..(260): n is a, c, g, or t
  misc_feature (300)..(300): n is a, c, g, or t
  misc_feature (309)..(309): n is a, c, g, or t
gagatagtcctcaggcctgagagaaagctggatgacagtcaagatccaggtgtatcaagccagaccaagaacaaagggcagttgtctnaactagtcagtcagaataggagagggcaagagggaggccattgtagcgtgtgcacctgtgcccttgctgccttcctcttcacacttcctcctcgccctccctggcctcttggtagaggttcttcatgcctgggggngggaacaagtgaggttcntgnactttgctgattnanccactcccaggtttgctggcagctttggccacgttatttntgaggtggntttttttcctttgtgttcagagtgacttgggttctgattattgacgtttgtgtggaacggcgc

SEQ ID NO: 3268 - DNA, 372 bp, Mus musculus; identical to SEQ ID NO: 3267
  misc_feature (88)..(88): n is a, c, g, or t
  misc_feature (224)..(224): n is a, c, g, or t
  misc_feature (242)..(242): n is a, c, g, or t
  misc_feature (245)..(245): n is a, c, g, or t
  misc_feature (258)..(258): n is a, c, g, or t
  misc_feature (260)..(260): n is a, c, g, or t
  misc_feature (300)..(300): n is a, c, g, or t
  misc_feature (309)..(309): n is a, c, g, or t

SEQ ID NO: 3269 - DNA, 171 bp, Mus musculus
gattcttgtcaatctttggttacattcactggcacttccttaggggacttacttgacagtggaattactgaattaggtaaaagaacaaaatttgccaatttgctctttccagcatcacatgcaggaggcaacgcccttgtctgcactggggattacgtacttccttttcat

SEQ ID NO: 3270 - DNA, 171 bp, Mus musculus; identical to SEQ ID NO: 3269

SEQ ID NO: 3271 - DNA, 314 bp, Mus musculus
  misc_feature (234)..(234): n is a, c, g, or t
  misc_feature (286)..(286): n is a, c, g, or t
  misc_feature (288)..(289): n is a, c, g, or t
cctgttctttcctggctgtgaaggtttagaggatgatgaagtcacacagccactgtccatatctgggagttggtggctcagtcaacacgggaaccagtgaataaataccctgtatttcctgcaggacgctgcgtgggtagaggagaagcaggtactcatgaggacaaaccaggacctgctggagaagatttacagactggagatggaggagaaccagctaaagagcgaaatgcnaagacgccaaggaccagaacgagctgttagaattcagagtgctagaactcgnannaagagactctatctgttgtaagctc

SEQ ID NO: 3272 - DNA, 314 bp, Mus musculus; identical to SEQ ID NO: 3271
  misc_feature (234)..(234): n is a, c, g, or t
  misc_feature (286)..(286): n is a, c, g, or t
  misc_feature (288)..(289): n is a, c, g, or t

SEQ ID NO: 3273 - DNA, 242 bp, Mus musculus
  misc_feature (57)..(57): n is a, c, g, or t
catgatcgtgtttgtttaaaacacaaggcgtggcttagacagtttgcaacgcagtgnaccgagcactcctcacagcttcaaggtaacagcgaccgtgcccatgccgtcctaggcagcttcccttccctcgccttttccttacctcccatgaatgagaaggccatttcccctttgcagaccgcatacagttttagtttatgcatttccttaaaattaactgtagaatccaggatacaaaccat

SEQ ID NO: 3274 - DNA, 242 bp, Mus musculus; identical to SEQ ID NO: 3273
  misc_feature (57)..(57): n is a, c, g, or t

SEQ ID NO: 3275 - DNA, 509 bp, Mus musculus
  misc_feature (26)..(26): n is a, c, g, or t
  misc_feature (35)..(35): n is a, c, g, or t
  misc_feature (37)..(37): n is a, c, g, or t
  misc_feature (44)..(44): n is a, c, g, or t
  misc_feature (46)..(46): n is a, c, g, or t
  misc_feature (48)..(48): n is a, c, g, or t
  misc_feature (50)..(50): n is a, c, g, or t
  misc_feature (52)..(52): n is a, c, g, or t
  misc_feature (84)..(84): n is a, c, g, or t
  misc_feature (86)..(86): n is a, c, g, or t
  misc_feature (116)..(116): n is a, c, g, or t
  misc_feature (131)..(131): n is a, c, g, or t
  misc_feature (139)..(139): n is a, c, g, or t
  misc_feature (219)..(219): n is a, c, g, or t
  misc_feature (221)..(221): n is a, c, g, or t
  misc_feature (270)..(270): n is a, c, g, or t
ccatggtggccgacagaacgaaagtntcctgcaantnctggcantnantnanttttgaaagacagcctgcatccttcatccgantngtcgggacacacaacacagcaaatgaggtnttccactgtgtccantttgagtntccggagcagcagagcaaccagaaggaggacagcagtgaggagccagggacaggggaccccagcacccccaatcagcagntngaccctcatgcaccacgggcacccagcgccagctcactaccaccgagtncaggccctaactcacgctcacccaaccaacagaaccaataaagcaggcagaggatgtagtgttactcaggtgggcctggatggagctgtgtcctctcccgcccctgggaggaacaggtctggctgcagaactcaccccaaccaggttttttccatccggggacagaaaggtgcctgtgttccccccactcctcaagcagtctccagggggaggaagagggtcttgattcttcaagccta

SEQ ID NO: 3276 - DNA, 509 bp, Mus musculus; identical to SEQ ID NO: 3275
  misc_feature (26)..(26): n is a, c, g, or t
  misc_feature (35)..(35): n is a, c, g, or t
  misc_feature (37)..(37): n is a, c, g, or t
  misc_feature (44)..(44): n is a, c, g, or t
  misc_feature (46)..(46): n is a, c, g, or t
  misc_feature (48)..(48): n is a, c, g, or t
  misc_feature (50)..(50): n is a, c, g, or t
  misc_feature (52)..(52): n is a, c, g, or t
  misc_feature (84)..(84): n is a, c, g, or t
  misc_feature (86)..(86): n is a, c, g, or t
  misc_feature (116)..(116): n is a, c, g, or t
  misc_feature (131)..(131): n is a, c, g, or t
  misc_feature (139)..(139): n is a, c, g, or t
  misc_feature (219)..(219): n is a, c, g, or t
  misc_feature (221)..(221): n is a, c, g, or t
  misc_feature (270)..(270): n is a, c, g, or t

SEQ ID NO: 3277 - DNA, 448 bp, Mus musculus
  misc_feature (36)..(59): n is a, c, g, or t
  misc_feature (74)..(75): n is a, c, g, or t
  misc_feature (77)..(77): n is a, c, g, or t
  misc_feature (94)..(94): n is a, c, g, or t
  misc_feature (100)..(100): n is a, c, g, or t
  misc_feature (102)..(102): n is a, c, g, or t
  misc_feature (106)..(106): n is a, c, g, or t
  misc_feature (109)..(109): n is a, c, g, or t
  misc_feature (119)..(119): n is a, c, g, or t
  misc_feature (121)..(121): n is a, c, g, or t
  misc_feature (159)..(159): n is a, c, g, or t
  misc_feature (229)..(230): n is a, c, g, or t
  misc_feature (232)..(232): n is a, c, g, or t
  misc_feature (245)..(245): n is a, c, g, or t
  misc_feature (252)..(299): n is a, c, g, or t
  misc_feature (308)..(308): n is a, c, g, or t
  misc_feature (379)..(381): n is a, c, g, or t
  misc_feature (384)..(384): n is a, c, g, or t
  misc_feature (387)..(389): n is a, c, g, or t
  misc_feature (391)..(394): n is a, c, g, or t
ttgcattttggacgtcaacccacaagcactgaaagnnnnnnnnnnnnnnnnnnnnnnnncttatgtggtgtttnntnctgctccagagctaganaccttncntgcnatncacaaggctntngtggatgcgggaatcaccaccaagcttttgacggactntgacttgaagaaaacagtggatgaaagtgcccgaattcagagagcatacaaccactactttgatttgatnntngtaaatgacaatntagacannnnnnnnnnnnnnnnnnnnnnnnnnnnnnnnnnnnnnnnnnnnnnnncacagtggntcccaattagctgggtgtactgatgattcaataaggttaacaacagataaataaaactttaaaacagtgannnaanaannnannnntctgctgggcgagcacatgcagaggtggaaggcgcctgcgcatcaaggcatttt

SEQ ID NO: 3278 - DNA, 448 bp, Mus musculus; identical to SEQ ID NO: 3277
  misc_feature (36)..(59): n is a, c, g, or t
  misc_feature (74)..(75): n is a, c, g, or t
  misc_feature (77)..(77): n is a, c, g, or t
  misc_feature (94)..(94): n is a, c, g, or t
  misc_feature (100)..(100): n is a, c, g, or t
  misc_feature (102)..(102): n is a, c, g, or t
  misc_feature (106)..(106): n is a, c, g, or t
  misc_feature (109)..(109): n is a, c, g, or t
  misc_feature (119)..(119): n is a, c, g, or t
  misc_feature (121)..(121): n is a, c, g, or t
  misc_feature (159)..(159): n is a, c, g, or t
  misc_feature (229)..(230): n is a, c, g, or t
  misc_feature (232)..(232): n is a, c, g, or t
  misc_feature (245)..(245): n is a, c, g, or t
  misc_feature (252)..(299): n is a, c, g, or t
  misc_feature (308)..(308): n is a, c, g, or t
  misc_feature (379)..(381): n is a, c, g, or t
  misc_feature (384)..(384): n is a, c, g, or t
  misc_feature (387)..(389): n is a, c, g, or t
  misc_feature (391)..(394): n is a, c, g, or t

SEQ ID NO: 3279 - DNA, 207 bp, Mus musculus
  misc_feature (37)..(37): n is a, c, g, or t
  misc_feature (45)..(45): n is a, c, g, or t
  misc_feature (69)..(69): n is a, c, g, or t
  misc_feature (72)..(72): n is a, c, g, or t
  misc_feature (90)..(90): n is a, c, g, or t
  misc_feature (96)..(96): n is a, c, g, or t
  misc_feature (106)..(106): n is a, c, g, or t
  misc_feature (159)..(159): n is a, c, g, or t
tatattattttatgtttgagtaagaattttaatattnccatattntgtagtattttctttgtatatttntantacggcacatgagatgantcactncctttttttntatggtgtacgacagttagagatgctgatttttttttcctgataaattctttntttaagaaagacaattttaatgtttacaacaataaaccacgtaaatga

SEQ ID NO: 3280 - DNA, 207 bp, Mus musculus; identical to SEQ ID NO: 3279
  misc_feature (37)..(37): n is a, c, g, or t
  misc_feature (45)..(45): n is a, c, g, or t
  misc_feature (69)..(69): n is a, c, g, or t
  misc_feature (72)..(72): n is a, c, g, or t
  misc_feature (90)..(90): n is a, c, g, or t
  misc_feature (96)..(96): n is a, c, g, or t
  misc_feature (106)..(106): n is a, c, g, or t
  misc_feature (159)..(159): n is a, c, g, or t

SEQ ID NO: 3281 - DNA, 520 bp, Mus musculus
  misc_feature (81)..(81): n is a, c, g, or t
  misc_feature (85)..(92): n is a, c, g, or t
  misc_feature (95)..(95): n is a, c, g, or t
  misc_feature (98)..(112): n is a, c, g, or t
  misc_feature (149)..(165): n is a, c, g, or t
  misc_feature (241)..(241): n is a, c, g, or t
  misc_feature (243)..(243): n is a, c, g, or t
  misc_feature (248)..(248): n is a, c, g, or t
  misc_feature (255)..(255): n is a, c, g, or t
  misc_feature (259)..(259): n is a, c, g, or t
  misc_feature (270)..(270): n is a, c, g, or t
  misc_feature (285)..(285): n is a, c, g, or t
  misc_feature (291)..(291): n is a, c, g, or t
  misc_feature (321)..(321): n is a, c, g, or t
  misc_feature (343)..(344): n is a, c, g, or t
  misc_feature (374)..(374): n is a, c, g, or t
  misc_feature (486)..(486): n is a, c, g, or t
  misc_feature (495)..(495): n is a, c, g, or t
ctaagtccttattatgaagtgaatctggtaacagcatatataatcatggtgctcatgggcatctgggcattttatgttgcnggannnnnnnngangcnnnnnnnnnnnnnnnctctgccaagacaaggattttcttctttacaaccaannnnnnnnnnnnnnnnngaccatcagcacctctaagcagcagcctgtgtctttagaggaagcacaactgggccctgttctaaaaagacccctntntcttngaacttngaanccacagaactntccagcctggaactntcctgngctttcatgcagcagcctctggaagagctncagtgtagcctgcagcctggcnncacatttgaagcatctggggaaacaaggantgatgcttctgggcttctccagacttgattatcctggatgtgcaggacagctgagagtcactggggtccaatggggagttcgagaaaacacccaaaagctgtttagtgttgntcttctaanccaacttcagctgagcaagtaaata

SEQ ID NO: 3282 - DNA, 520 bp, Mus musculus; identical to SEQ ID NO: 3281
  misc_feature (81)..(81): n is a, c, g, or t
  misc_feature (85)..(92): n is a, c, g, or t
  misc_feature (95)..(95): n is a, c, g, or t
  misc_feature (98)..(112): n is a, c, g, or t
  misc_feature (149)..(165): n is a, c, g, or t
  misc_feature (241)..(241): n is a, c, g, or t
  misc_feature (243)..(243): n is a, c, g, or t
  misc_feature (248)..(248): n is a, c, g, or t
  misc_feature (255)..(255): n is a, c, g, or t
  misc_feature (259)..(259): n is a, c, g, or t
  misc_feature (270)..(270): n is a, c, g, or t
  misc_feature (285)..(285): n is a, c, g, or t
  misc_feature (291)..(291): n is a, c, g, or t
  misc_feature (321)..(321): n is a, c, g, or t
  misc_feature (343)..(344): n is a, c, g, or t
  misc_feature (374)..(374): n is a, c, g, or t
  misc_feature (486)..(486): n is a, c, g, or t
  misc_feature (495)..(495): n is a, c, g, or t

SEQ ID NO: 3283 - DNA, 293 bp, Mus musculus
  misc_feature (98)..(132): n is a, c, g, or t
  misc_feature (134)..(148): n is a, c, g, or t
agccaagaccagtgggtccgtgaactagtggactgctttgagcgcaaagagtgtggaactggtcatgggaagagttttcaccaccaaaaacatttgcnnnnnnnnnnnnnnnnnnnnnnnnnnnnnnnnnnncnnnnnnnnnnnnnnnaggcctgaggctgaggcaaatgagaaacagcaagatgacagacagcaagaagcaccaggagctggagctagcacaccagcttgggtaccggtgctgtccctcctggccattgtcttcttcctcactgcagccatggcctatgtgc

SEQ ID NO: 3284 - DNA, 293 bp, Mus musculus; identical to SEQ ID NO: 3283
  misc_feature (98)..(132): n is a, c, g, or t
  misc_feature (134)..(148): n is a, c, g, or t

SEQ ID NO: 3285 - DNA, 151 bp, Mus musculus
cacaatcctaggatccttcctagagtcactcacatgggacccggacaccgagacccaggaacctttagagagtggagctggactcaaggacagtaatcctcttcctttggtttcatttttctatgatttcaattgcaggagaccaactgtg

SEQ ID NO: 3286 - DNA, 151 bp, Mus musculus; identical to SEQ ID NO: 3285

SEQ ID NO: 3287 - DNA, 69 bp, Mus musculus
cccagcacagagagggcttaagtgaccacagagggtgagccagtgtcccactgtgacagggacagagca

SEQ ID NO: 3288 - DNA, 69 bp, Mus musculus; identical to SEQ ID NO: 3287

SEQ ID NO: 3289 - DNA, 69 bp, Mus musculus; identical to SEQ ID NO: 3287

SEQ ID NO: 3290 - DNA, 189 bp, Mus musculus
  misc_feature (80)..(80): n is a, c, g, or t
  misc_feature (118)..(118): n is a, c, g, or t
  misc_feature (151)..(151): n is a, c, g, or t
ttagccaggattacctagtgagatcctattttaaggtccccttccctgttcctgacaaaaacacacaaattctgtttgtntcagttttagcacattgggctagaggggaaacgacatnatccaaaacgatttttttctgtacaagtatttntttacctgacttggttaccagttttgcatgtaagaagc

SEQ ID NO: 3291 - DNA, 189 bp, Mus musculus; identical to SEQ ID NO: 3290
  misc_feature (80)..(80): n is a, c, g, or t
  misc_feature (118)..(118): n is a, c, g, or t
  misc_feature (151)..(151): n is a, c, g, or t

SEQ ID NO: 3292 - DNA, 189 bp, Mus musculus; identical to SEQ ID NO: 3290
  misc_feature (80)..(80): n is a, c, g, or t
  misc_feature (118)..(118): n is a, c, g, or t
  misc_feature (151)..(151): n is a, c, g, or t

SEQ ID NO: 3293 - DNA, 255 bp, Mus musculus
agcgcgaatctatcggaatgagataaggcagattttcacagctttcgacgtgcactatcgtggatttttaactatagaagatttcaagagggcgtttagttgagtggttcccaagctaccagcgaggacagtgctggaggtgttcagctcctgtttctaggttcctgcctggagttcctgcccagacgtccctggatgatggcctacaagctctaaggtgcatgaaccctttccttcccaagctgatctcgttcg

SEQ ID NO: 3294 - DNA, 255 bp, Mus musculus; identical to SEQ ID NO: 3293

SEQ ID NO: 3295 - DNA, 255 bp, Mus musculus; identical to SEQ ID NO: 3293

SEQ ID NO: 3296 - DNA, 85 bp, Mus musculus
gctaactgtagcagcagaatccagggcatggcatcatcctggttctgctctgtcgcatcctatgctgaaccactgcaatctgctt

SEQ ID NO: 3297 - DNA, 85 bp, Mus musculus; identical to SEQ ID NO: 3296

SEQ ID NO: 3298 - DNA, 85 bp, Mus musculus; identical to SEQ ID NO: 3296

SEQ ID NO: 3299 - DNA, 231 bp, Mus musculus
  misc_feature (75)..(92): n is a, c, g, or t
tcattgctatcatgagctttgttacgacgatgaggtcaagcgggtagtgactgaacctctggagctggcacaagnnnnnnnnnnnnnnnnnntgaacatcccctgggaggttttccatgcctattgccagcttcctgtgagtttcaagctcgaagctggagacaagaagcctgaaaccaagtaacttcttaatcttgtagatcctaggtgcaatggcctcacctaaggttt

SEQ ID NO: 3300 - DNA, 231 bp, Mus musculus; identical to SEQ ID NO: 3299
  misc_feature (75)..(92): n is a, c, g, or t

SEQ ID NO: 3301 - DNA, 231 bp, Mus musculus; identical to SEQ ID NO: 3299
  misc_feature (75)..(92): n is a, c, g, or t

SEQ ID NO: 3302 - DNA, 228 bp, Mus musculus
  misc_feature (47)..(61): n is a, c, g, or t
  misc_feature (108)..(122): n is a, c, g, or t
atgtccatatcacctggcttatggaaagggagggaactccaataaannnnnnnnnnnnnnntggtgcagtacgaggtggagatatttgttttgatttgagccaactannnnnnnnnnnnnnnaaagagcattttgcctttggtaggcttcgccttggtcccggcgttcctggggctgatcgggtatcacctgtacagaaaggccagcagacccaaagtttccaaaaag

SEQ ID NO: 3303 - DNA, 228 bp, Mus musculus; identical to SEQ ID NO: 3302
  misc_feature (47)..(61): n is a, c, g, or t
  misc_feature (108)..(122): n is a, c, g, or t

SEQ ID NO: 3304 - DNA, 228 bp, Mus musculus; identical to SEQ ID NO: 3302
  misc_feature (47)..(61): n is a, c, g, or t
  misc_feature (108)..(122): n is a, c, g, or t

SEQ ID NO: 3305 - DNA, 129 bp, Mus musculus
cacccatttgagaggtgcagaagttatggggccctgctgttaacctggtttctgtgagattagtgatgttagaattttgacctccagaattctgagcaaataaattcctgccgttttaagacaccaagg

SEQ ID NO: 3306 - DNA, 129 bp, Mus musculus; identical to SEQ ID NO: 3305

SEQ ID NO: 3307 - DNA, 129 bp, Mus musculus; identical to SEQ ID NO: 3305

SEQ ID NO: 3308 - DNA, 94 bp, Mus musculus
aactaatgggccttggtgcttcttatctttgatccctctcctgggggaaattattattttactccccgcgggcccagaagcttgcgacctgctt

SEQ ID NO: 3309 - DNA, 94 bp, Mus musculus; identical to SEQ ID NO: 3308

SEQ ID NO: 3310 - DNA, 94 bp, Mus musculus; identical to SEQ ID NO: 3308

SEQ ID NO: 3311 - DNA, 186 bp, Mus musculus
tatggggaccgtagtgtggtatattgtttttattttattttttttcggttttttttttgggttttatttttttcattttcagttgtttttgatgcagcttgtaggaagataattgttgttttgttaactgaataccactctataattgcaaaaaaaaaattgcggctgttttgttgacattttgaa

SEQ ID NO: 3312 - DNA, 186 bp, Mus musculus; identical to SEQ ID NO: 3311

SEQ ID NO: 3313 - DNA, 186 bp, Mus musculus; identical to SEQ ID NO: 3311

SEQ ID NO: 3314 - DNA, 123 bp, Mus musculus
aatgttggagtggtagcagcaggaaggcaatgcagaaattggtcgggttgggggatgggttagagttgtgttttttagctgaatctttacaacagccctttgacaatttgttttgagaaaatg

SEQ ID NO: 3315 - DNA, 123 bp, Mus musculus; identical to SEQ ID NO: 3314

SEQ ID NO: 3316 - DNA, 123 bp, Mus musculus; identical to SEQ ID NO: 3314

SEQ ID NO: 3317 - DNA, 71 bp, Mus musculus
tgtctagctgagacaccacaaatgattgccctcttcgttttgaattgctataaaagcatgcctgggtctga

SEQ ID NO: 3318 - DNA, 71 bp, Mus musculus; identical to SEQ ID NO: 3317

SEQ ID NO: 3319 - DNA, 71 bp, Mus musculus; identical to SEQ ID NO: 3317

SEQ ID NO: 3320 - DNA, 34 bp, Mus musculus
tgccttctctggcctggcggcgttttgctcattt

SEQ ID NO: 3321 - DNA, 34 bp, Mus musculus; identical to SEQ ID NO: 3320

SEQ ID NO: 3322 - DNA, 34 bp, Mus musculus; identical to SEQ ID NO: 3320

SEQ ID NO: 3323 - DNA, 219 bp, Mus musculus
tttggttttacgtgaccaagagcacgcctttccagtgagtccagataagtgggtggactatgatttgtttacaaggtggaaactggatcctgggagcgaggaaacccagaccctggttcgagagtacttttcgtgggaggggaccttctagtatttgggcaaagccgtcaatctaggcaagattttcaagtgaacaagttttgccagtcgcctatcttc

SEQ ID NO: 3324 - DNA, 219 bp, Mus musculus; identical to SEQ ID NO: 3323

SEQ ID NO: 3325 - DNA, 219 bp, Mus musculus; identical to SEQ ID NO: 3323

SEQ ID NO: 3326 - DNA, 194 bp, Mus musculus
catttcgcttttgacgaagagtttggaagaatcaaggcccactttagaccaatcaaaagcgttcctttcctttaagatggcaagagatacagcagcggtggcgaagatggttacttccgcatccactattttgacccacagtactttgattttgattttgagccctaatttttggttttccatccacaacagag

SEQ ID NO: 3327 - DNA, 194 bp, Mus musculus; identical to SEQ ID NO: 3326

SEQ ID NO: 3328 - DNA, 194 bp, Mus musculus; identical to SEQ ID NO: 3326

SEQ ID NO: 3329 - DNA, 204 bp, Mus musculus
  misc_feature (79)..(106): n is a, c, g, or t
gcatccctggtttaatcgttaggttttgctgcaggctgtggacagtagagactatgctagattttggtgcctcgagggnnnnnnnnnnnnnnnnnnnnnnnnnnnngagctgtttttccatcctgctgggtgcttacccccatgacaggatgagattctggggcaaggcccatattttaacctgtttacttgtgatccttttag

SEQ ID NO: 3330 - DNA, 204 bp, Mus musculus; identical to SEQ ID NO: 3329
  misc_feature (79)..(106): n is a, c, g, or t

SEQ ID NO: 3331 - DNA, 204 bp, Mus musculus; identical to SEQ ID NO: 3329
  misc_feature (79)..(106): n is a, c, g, or t

SEQ ID NO: 3332 - DNA, 33 bp, Mus musculus
gcagagttccatttaatcctccccgtgcaccta

SEQ ID NO: 3333 - DNA, 33 bp, Mus musculus; identical to SEQ ID NO: 3332

SEQ ID NO: 3334 - DNA, 33 bp, Mus musculus; identical to SEQ ID NO: 3332

SEQ ID NO: 3335 - DNA, 172 bp, Mus musculus
accctgattcattggcgtttctaatttttaaataaacctcctaaatatccgagagactaacctatactaagttcataaattatacctagtgtaccaatgttgctgttctcttgttggagtctcacggtgggtttctgtcttctgactgtttctcaggggacagttacggtag

SEQ ID NO: 3336 - DNA, 172 bp, Mus musculus; identical to SEQ ID NO: 3335

SEQ ID NO: 3337 - DNA, 172 bp, Mus musculus; identical to SEQ ID NO: 3335

SEQ ID NO: 3338 - DNA, 162 bp, Mus musculus
  misc_feature (70)..(126): n is a, c, g, or t
cacacagtcaaggtgaaagcccccgggctttaagacattacctcccaagagccgacctaactggtatctnnnnnnnnnnnnnnnnnnnnnnnnnnnnnnnnnnnnnnnnnnnnnnnnnnnnnnnnngcatggtcagtttgactcgcagctttaggaagggag

SEQ ID NO: 3339 - DNA, 162 bp, Mus musculus; identical to SEQ ID NO: 3338
  misc_feature (70)..(126): n is a, c, g, or t

SEQ ID NO: 3340 - DNA, 162 bp, Mus musculus; identical to SEQ ID NO: 3338
  misc_feature (70)..(126): n is a, c, g, or t

SEQ ID NO: 3341 - DNA, 139 bp, Mus musculus
ccatggtccctaccttgtgaagatgcatgcaaacatgaaattagaagcgatccttatataaagatcgagggggaggacgctgaagactggctatgtgtggactttgggtgtatggtgatccatttgttgattccagtaa

SEQ ID NO: 3342 - DNA, 139 bp, Mus musculus; identical to SEQ ID NO: 3341

SEQ ID NO: 3343 - DNA, 139 bp, Mus musculus; identical to SEQ ID NO: 3341

SEQ ID NO: 3344 - DNA, 64 bp, Mus musculus
tttgtcagacaccgcctgttcctctgctaactggccacccttcacgctcagcaccatacagcct

SEQ ID NO: 3345 - DNA, 64 bp, Mus musculus; identical to SEQ ID NO: 3344

SEQ ID NO: 3346 - DNA, 64 bp, Mus musculus; identical to SEQ ID NO: 3344

SEQ ID NO: 3347 - DNA, 160 bp, Mus musculus
  misc_feature (66)..(80): n is a, c, g, or t
ttacttctaaccagaaatcgaccctattccccaggctacagcttaccacagaccagtttctttgcnnnnnnnnnnnnnnngtttctctggattttctggtttccctttcagggttccttccatggcaaatgtcccttccaagcccctagactcttacttg

SEQ ID NO: 3348 - DNA, 160 bp, Mus musculus; identical to SEQ ID NO: 3347
  misc_feature (66)..(80): n is a, c, g, or t

SEQ ID NO: 3349 - DNA, 160 bp, Mus musculus; identical to SEQ ID NO: 3347
  misc_feature (66)..(80): n is a, c, g, or t

SEQ ID NO: 3350 - DNA, 89 bp, Mus musculus
tgccctgtgttttggcggctccatcttccttcctcagggtaccactgaggtctgcgtacccctttattctggttcacagattttgaaca

SEQ ID NO: 3351 - DNA, 89 bp, Mus musculus; identical to SEQ ID NO: 3350

SEQ ID NO: 3352 - DNA, 89 bp, Mus musculus; identical to SEQ ID NO: 3350

SEQ ID NO: 3353 - DNA, 70 bp, Mus musculus
cccctcttcattcgtggaggcatgtatgcctagaggtgccacagcctccatcttactgtaaataagtgtg

SEQ ID NO: 3354 - DNA, 70 bp, Mus musculus; identical to SEQ ID NO: 3353

SEQ ID NO: 3355 - DNA, 70 bp, Mus musculus; identical to SEQ ID NO: 3353

SEQ ID NO: 3356 - DNA, 175 bp, Mus musculus
  misc_feature (52)..(52): n is a, c, g, or t
tggttccagttgaccggcagagaagggtgatccagcccatgctcttcccttntggctttcattttccccatcttccttggcttttgtccttcattccttaccttccaccctcctttctgtgaatttgctcctgagttctgtggtgtggccgaccactgtgctgtgcgctgtgaga

SEQ ID NO: 3357 - DNA, 175 bp, Mus musculus; identical to SEQ ID NO: 3356
  misc_feature (52)..(52): n is a, c, g, or t

SEQ ID NO: 3358 - DNA, 175 bp, Mus musculus; identical to SEQ ID NO: 3356
  misc_feature (52)..(52): n is a, c, g, or t

SEQ ID NO: 3359 - DNA, 132 bp, Mus musculus
ggcctgccaatcaacccataagggtgtggccacctttaggggtgagcttagattcccctttgttttgcagtaccagcagcagacattagttttgcttgaactatatccccacataagttactaaatgagtga

SEQ ID NO: 3360 - DNA, 132 bp, Mus musculus; identical to SEQ ID NO: 3359

SEQ ID NO: 3361 - DNA, 132 bp, Mus musculus; identical to SEQ ID NO: 3359

SEQ ID NO: 3362 - DNA, 187 bp, Mus musculus
  misc_feature (53)..(76): n is a, c, g, or t
attcctcagttttagccagtattagcccctgccattatgggcctggggtaggnnnnnnnnnnnnnnnnnnnnnnnntttccctagtacacaggattttgctggggccaccaagccttccctgtgcccttcccatccatagtgcatggtgtgtggtgcccccagggtttcaggacagatcaggcccca

SEQ ID NO: 3363 - DNA, 187 bp, Mus musculus; identical to SEQ ID NO: 3362
  misc_feature (53)..(76): n is a, c, g, or t

SEQ ID NO: 3364 - DNA, 187 bp, Mus musculus; identical to SEQ ID NO: 3362
  misc_feature (53)..(76): n is a, c, g, or t

SEQ ID NO: 3365 - DNA, 183 bp, Mus musculus
  misc_feature (47)..(47): n is a, c, g, or t
  misc_feature (80)..(80): n is a, c, g, or t
  misc_feature (90)..(90): n is a, c, g, or t
ggcggtcagctttgggcttcttcttctgggtgatcattttagccacntggatcaccattttccagatctaccggccccgntggggcgttnttggggactacttatccttcaccattcccctgggcaatccctaacaacttcataagctggtgatttgttctttttcccaggatgaaggcttct

SEQ ID NO: 3366 - DNA, 183 bp, Mus musculus; identical to SEQ ID NO: 3365
  misc_feature (47)..(47): n is a, c, g, or t
  misc_feature (80)..(80): n is a, c, g, or t
  misc_feature (90)..(90): n is a, c, g, or t

SEQ ID NO: 3367 - DNA, 183 bp, Mus musculus; identical to SEQ ID NO: 3365
  misc_feature (47)..(47): n is a, c, g, or t
  misc_feature (80)..(80): n is a, c, g, or t
  misc_feature (90)..(90): n is a, c, g, or t

SEQ ID NO: 3368 - DNA, 67 bp, Mus musculus
agctgagccccgactgggagagctccagcctttcaatactgactatgacaattttgctcaggatttt

SEQ ID NO: 3369 - DNA, 67 bp, Mus musculus; identical to SEQ ID NO: 3368

SEQ ID NO: 3370 - DNA, 67 bp, Mus musculus; identical to SEQ ID NO: 3368

SEQ ID NO: 3371 - DNA, 198 bp, Mus musculus
caaagtctatgatccccacaagtgggatgaaagcctccctgttcgtattgtcaattttaggccagaaaccttgttagcctgtgggcctcccttcccacgacatttccatttcctaccctccatccaatgtagaatcttgccaagcctagcctttgggaagccaagaaccatattcagtcacagggttattattcaatc

SEQ ID NO: 3372 - DNA, 198 bp, Mus musculus; identical to SEQ ID NO: 3371

SEQ ID NO: 3373 - DNA, 198 bp, Mus musculus; identical to SEQ ID NO: 3371

SEQ ID NO: 3374 - DNA, 52 bp, Mus musculus
tatttccgagaccatatccctctaatatattcgggacagggaaggattactt

SEQ ID NO: 3375 - DNA, 52 bp, Mus musculus; identical to SEQ ID NO: 3374

SEQ ID NO: 3376 - DNA, 52 bp, Mus musculus; identical to SEQ ID NO: 3374

SEQ ID NO: 3377 - DNA, 36 bp, Mus musculus
attatgccccggtatctggctgacgtccaggttcac

SEQ ID NO: 3378 - DNA, 36 bp, Mus musculus; identical to SEQ ID NO: 3377

SEQ ID NO: 3379 - DNA, 36 bp, Mus musculus; identical to SEQ ID NO: 3377

SEQ ID NO: 3380 - DNA, 119 bp, Mus musculus
  misc_feature (41)..(55): n is a, c, g, or t
ggaatggttttttcctgcctgaaatattagaaatgtggaannnnnnnnnnnnnnnggggttatgctgagcatgaaggcaagccctaatgcaatttttcctggtatttccccatgtttgg

SEQ ID NO: 3381 - DNA, 119 bp, Mus musculus; identical to SEQ ID NO: 3380
  misc_feature (41)..(55): n is a, c, g, or t

SEQ ID NO: 3382 - DNA, 119 bp, Mus musculus; identical to SEQ ID NO: 3380
  misc_feature (41)..(55): n is a, c, g, or t

SEQ ID NO: 3383 - DNA, 104 bp, Mus musculus
aatttgggagccccgttgcagcctttccctctgaagcatttaggagctactgctttttccactttccctggtatcctcggttccgacagttcgggagggctctg

SEQ ID NO: 3384 - DNA, 104 bp, Mus musculus; identical to SEQ ID NO: 3383

SEQ ID NO: 3385 - DNA, 104 bp, Mus musculus; identical to SEQ ID NO: 3383

SEQ ID NO: 3386 - DNA, 162 bp, Mus musculus
ttataagacgtcagctgtgacgttttgtttggagaccctctctgagaggattttcagataagaggttatatattaaaattatctactgttgcgccagctagtgttgaacaatttcattcaaatcatgagtatgtgccctgttgttacttcctttcgcagttg

SEQ ID NO: 3387 - DNA, 162 bp, Mus musculus; identical to SEQ ID NO: 3386

SEQ ID NO: 3388 - DNA, 162 bp, Mus musculus; identical to SEQ ID NO: 3386

SEQ ID NO: 3389 - DNA, 185 bp, Mus musculus
accacatcaaattccgggccacaggaggaaacaggacctagacccctggaactggaacccagttagcccttagagatattgcttgttttgggatgaagattgggcggattgaggatgtcacccccattccttttgatagcaatcgaagaaaagggggttgttgtgttcgccgtttgtgaacagga

SEQ ID NO: 3390 - DNA, 185 bp, Mus musculus; identical to SEQ ID NO: 3389

SEQ ID NO: 3391 - DNA, 185 bp, Mus musculus; identical to SEQ ID NO: 3389

SEQ ID NO: 3392 - DNA, 140 bp, Mus musculus
gaagattcccaaaatctgtgccttcccatgagggtgtccccttttaagttattagaacggacgcaggactgcagatttgtgctggcagcagcagagggtattttcccagaggagtttccagccggcctgaaagcaaatat

SEQ ID NO: 3393 - DNA, 140 bp, Mus musculus; identical to SEQ ID NO: 3392

SEQ ID NO: 3394 - DNA, 140 bp, Mus musculus; identical to SEQ ID NO: 3392

SEQ ID NO: 3395 - DNA, 53 bp, Mus musculus
aataccgtgcccatgagtcataagttaaatcccattaatcttcaggtggcctt

SEQ ID NO: 3396 - DNA, 53 bp, Mus musculus; identical to SEQ ID NO: 3395

SEQ ID NO: 3397 - DNA, 53 bp, Mus musculus; identical to SEQ ID NO: 3395

SEQ ID NO: 3398 - DNA, 93 bp, Mus musculus
agtaatatgcagattgacggccgggcctccatggtgtgaagcatgcggtagttctgaaacagttccttggccagcagtgtatcatgtggagaa

SEQ ID NO: 3399 - DNA, 93 bp, Mus musculus; identical to SEQ ID NO: 3398

SEQ ID NO: 3400 - DNA, 93 bp, Mus musculus; identical to SEQ ID NO: 3398

SEQ ID NO: 3401 - DNA, 161 bp, Mus musculus
cggtggccaagatgcctagccatttggcaccagggacatcccaccatcacagtcagaattaattcttcaggggcctgtggctggagtgaaggtgcctttttgcttgtttgtggcagagaggcaagcgagtggcctgtacccagactgctggggaatgggtt

SEQ ID NO: 3402 - DNA, 161 bp, Mus musculus; identical to SEQ ID NO: 3401

SEQ ID NO: 3403 - DNA, 161 bp, Mus musculus; identical to SEQ ID NO: 3401

SEQ ID NO: 3404 - DNA, 90 bp, Mus musculus
ggggaggccgagggccggagaacatcgccaccaatccatacccctgacccccataccccaacggaaaagtgagccggtatttgaagaagt

SEQ ID NO: 3405 - DNA, 90 bp, Mus musculus; identical to SEQ ID NO: 3404

SEQ ID NO: 3406 - DNA, 90 bp, Mus musculus; identical to SEQ ID NO: 3404

SEQ ID NO: 3407 - DNA, 93 bp, Mus musculus
cagatgaatagccctgcggccatacccccaggaagaactgagccagtatctgaagatgtttcgattgttcgagtgactgtagttctgggagaa

SEQ ID NO: 3408 - DNA, 93 bp, Mus musculus; identical to SEQ ID NO: 3407

SEQ ID NO: 3409 - DNA, 93 bp, Mus musculus; identical to SEQ ID NO: 3407

SEQ ID NO: 3410 - DNA, 100 bp, Mus musculus
gcattggttttggacccttatttagtgtggaccacgaaaaccctttggatggtaagatcgtgtctcttttcatcagatggcgaccattattctgtttttc

SEQ ID NO: 3411 - DNA, 100 bp, Mus musculus; identical to SEQ ID NO: 3410

SEQ ID NO: 3412 - DNA, 100 bp, Mus musculus; identical to SEQ ID NO: 3410

SEQ ID NO: 3413 - DNA, 113 bp, Mus musculus
tttgggggttccttggcaggcctcaccccgttttcttcaagtgccccatttcatatgccaagggagggtctatggacagtttttttaacttctcggattcaggttgttgttaa

SEQ ID NO: 3414 - DNA, 113 bp, Mus musculus; identical to SEQ ID NO: 3413

SEQ ID NO: 3415 - DNA, 113 bp, Mus musculus; identical to SEQ ID NO: 3413

SEQ ID NO: 3416 - DNA, 223 bp, Mus musculus
  misc_feature (110)..(124): n is a, c, g, or t
ttcccaatactagctatttgcgcagacacgctttttttccgaaaccactcaagtggcgctcttttcctttccctccacccccagagacatttggtctcattctataaccnnnnnnnnnnnnnnntcatagaagtttgcttttttttcaatcaaggtgttcccattccaggtctatacaatttattactttcttaaccactttttcctgggaatatttccatag

SEQ ID NO: 3417 - DNA, 223 bp, Mus musculus; identical to SEQ ID NO: 3416
  misc_feature (110)..(124): n is a, c, g, or t

SEQ ID NO: 3418 - DNA, 223 bp, Mus musculus; identical to SEQ ID NO: 3416
  misc_feature (110)..(124): n is a, c, g, or t

SEQ ID NO: 3419 - DNA, 139 bp, Mus musculus
ctcccatgaaatttaaggaatgttatgggctgcgcccggcctgatacccaaggctgttaaggaggatatatgttccggagataagattcagagtgcccgccacctggcgcctgaattcagccttcatgtcccctgatgc

SEQ ID NO: 3420 - DNA, 139 bp, Mus musculus; identical to SEQ ID NO: 3419

SEQ ID NO: 3421 - DNA, 139 bp, Mus musculus; identical to SEQ ID NO: 3419

SEQ ID NO: 3422 - DNA, 224 bp, Mus musculus
  misc_feature (87)..(101): n is a, c, g, or t
tcgttaagagacgacccttttagatcccgtgaagtatggttcagtcactttaatttccccaagcctgctgagctgagcctaattttnnnnnnnnnnnnnnnaatccagatgtttggaggagactggcagctgttttgggattcttccctgagtcttcccacctgcacaaggatgatccctcctttcttgtcacttgccttgaatttcatggagcctgtatcaat

SEQ ID NO: 3423 - DNA, 224 bp, Mus musculus; identical to SEQ ID NO: 3422
  misc_feature (87)..(101): n is a, c, g, or t

SEQ ID NO: 3424 - DNA, 224 bp, Mus musculus; identical to SEQ ID NO: 3422
  misc_feature (87)..(101): n is a, c, g, or t

SEQ ID NO: 3425 - DNA, 115 bp, Mus musculus
acaaggatgtcttcagggacccagctttgtagcccaaggccaggcgggaggccaagctcaagtttgaggaccgatacaagactcgtagaacaaatggtttttccataagcttcgc

SEQ ID NO: 3426 - DNA, 115 bp, Mus musculus; identical to SEQ ID NO: 3425

SEQ ID NO: 3427 - DNA, 115 bp, Mus musculus; identical to SEQ ID NO: 3425

SEQ ID NO: 3428 - DNA, 417 bp, Mus musculus
  misc_feature (203)..(203): n is a, c, g, or t
  misc_feature (228)..(228): n is a, c, g, or t
  misc_feature (246)..(246): n is a, c, g, or t
  misc_feature (259)..(259): n is a, c, g, or t
  misc_feature (266)..(266): n is a, c, g, or t
  misc_feature (286)..(286): n is a, c, g, or t
  misc_feature (290)..(290): n is a, c, g, or t
  misc_feature (298)..(298): n is a, c, g, or t
  misc_feature (303)..(303): n is a, c, g, or t
  misc_feature (306)..(306): n is a, c, g, or t
  misc_feature (313)..(313): n is a, c, g, or t
  misc_feature (327)..(327): n is a, c, g, or t
  misc_feature (330)..(330): n is a, c, g, or t
  misc_feature (333)..(333): n is a, c, g, or t
  misc_feature (339)..(339): n is a, c, g, or t
  misc_feature (350)..(350): n is a, c, g, or t
  misc_feature (356)..(356): n is a, c, g, or t
  misc_feature (358)..(358): n is a, c, g, or t
  misc_feature (361)..(361): n is a, c, g, or t
  misc_feature (365)..(365): n is a, c, g, or t
  misc_feature (368)..(368): n is a, c, g, or t
  misc_feature (370)..(370): n is a, c, g, or t
  misc_feature (375)..(375): n is a, c, g, or t
  misc_feature (377)..(377): n is a, c, g, or t
ggaaaaccaggctcctgaagaagcaggaaccagtggcttaggaaaagcaaagagaaaagcttgtcctttgcaacctgatcacagagatgatgaaaacgaatagaatttactcatctgaataatgtctccggtttttctacattacttacatgtaaatttgggtaaatgagtttgtccaattggcttgttgaggggaaaaaaanttaggctaaaatttagccattcaanagaaaccagatgtaagantggagaatttttntaatttntaaatttgaattgcatgctnacanttatgccntatgntcntcctttnttacctgttaaagnttnttnttaaanccaacgttccntggcantntanttgntantntacgntntttgcttagatttttgtactgatgccattttatgggcagt

SEQ ID NO: 3429 - DNA, 417 bp, Mus musculus; identical to SEQ ID NO: 3428
  misc_feature (203)..(203): n is a, c, g, or t
  misc_feature (228)..(228): n is a, c, g, or t
  misc_feature (246)..(246): n is a, c, g, or t
  misc_feature (259)..(259): n is a, c, g, or t
  misc_feature (266)..(266): n is a, c, g, or t
  misc_feature (286)..(286): n is a, c, g, or t
  misc_feature (290)..(290): n is a, c, g, or t
  misc_feature (298)..(298): n is a, c, g, or t
  misc_feature (303)..(303): n is a, c, g, or t
  misc_feature (306)..(306): n is a, c, g, or t
  misc_feature (313)..(313): n is a, c, g, or t
  misc_feature (327)..(327): n is a, c, g, or t
  misc_feature (330)..(330): n is a, c, g, or t
  misc_feature (333)..(333): n is a, c, g, or t
  misc_feature (339)..(339): n is a, c, g, or t
  misc_feature (350)..(350): n is a, c, g, or t
  misc_feature (356)..(356): n is a, c, g, or t
  misc_feature (358)..(358): n is a, c, g, or t
  misc_feature (361)..(361): n is a, c, g, or t
  misc_feature (365)..(365): n is a, c, g, or t
  misc_feature (368)..(368): n is a, c, g, or t
  misc_feature (370)..(370): n is a, c, g, or t
  misc_feature (375)..(375): n is a, c, g, or t
  misc_feature (377)..(377): n is a, c, g, or t

SEQ ID NO: 3430 - DNA, 319 bp, Mus musculus
  misc_feature (95)..(95): n is a, c, g, or t
agttagtgcctaacctaatggccactgaataactgcatctttcattttagagaaataaaccattttattggatcttaatggaatattctggtaanaacacaaagtgtagtacctttacctttggatggatatttagtcaaagcagcacaccttagattgtaagcaggcttaatgaattctaagtctattggtcctgcagagtgatgttgatgggataaaatgcatgtggttggtgaagaagattggagaaactgacgaaaatgggtaaatagagatgggcagacctttaaagaacactgtcaaactctgtgtactttag

SEQ ID NO: 3431 - DNA, 319 bp, Mus musculus; identical to SEQ ID NO: 3430
  misc_feature (95)..(95): n is a, c, g, or t

SEQ ID NO: 3432 - DNA, 48 bp, Mus musculus
actgtgcaagagactatggtgacccttattatgttatggacgtctggg

SEQ ID NO: 3433 - DNA, 48 bp, Mus musculus; identical to SEQ ID NO: 3432

SEQ ID NO: 3434 - DNA, 384 bp, Mus musculus
  misc_feature (78)..(124): n is a, c, g, or t
  misc_feature (142)..(142): n is a, c, g, or t
  misc_feature (196)..(197): n is a, c, g, or t
  misc_feature (208)..(208): n is a, c, g, or t
  misc_feature (233)..(233): n is a, c, g, or t
  misc_feature (256)..(256): n is a, c, g, or t
  misc_feature (261)..(261): n is a, c, g, or t
  misc_feature (286)..(286): n is a, c, g, or t
gttctctctacagttactgagcacacaggacctcaccatgggatggagttgtatcatcctcttcttggtagcaacagnnnnnnnnnnnnnnnnnnnnnnnnnnnnnnnnnnnnnnnnnnnnnnnctggtgaagcctggggcntcagtgaagatgtcctgcaaggcttctggctacacatttaccagttacaatatnnactgggtaaancagacacctggacagggcctggaanggattggagctatttatccaggnaatgntgatacttcctacaatcagaagttnaaaggcaaggccacattgactgcagacaaatcctccagcacagcctacatgcagctcagcagcctgacatctgaggactctgcggtctattactgtgc

SEQ ID NO: 3435 - DNA, 384 bp, Mus musculus; identical to SEQ ID NO: 3434
  misc_feature (78)..(124): n is a, c, g, or t
  misc_feature (142)..(142): n is a, c, g, or t
  misc_feature (196)..(197): n is a, c, g, or t
  misc_feature (208)..(208): n is a, c, g, or t
  misc_feature (233)..(233): n is a, c, g, or t
  misc_feature (256)..(256): n is a, c, g, or t
  misc_feature (261)..(261): n is a, c, g, or t
  misc_feature (286)..(286): n is a, c, g, or t

SEQ ID NO: 3436 - DNA, 442 bp, Mus musculus
  misc_feature (26)..(78): n is a, c, g, or t
  misc_feature (82)..(96): n is a, c, g, or t
  misc_feature (148)..(187): n is a, c, g, or t
  misc_feature (282)..(282): n is a, c, g, or t
  misc_feature (311)..(330): n is a, c, g, or t
  misc_feature (333)..(333): n is a, c, g, or t
  misc_feature (335)..(338): n is a, c, g, or t
  misc_feature (385)..(385): n is a, c, g, or t
  misc_feature (387)..(387): n is a, c, g, or t
  misc_feature (398)..(398): n is a, c, g, or t
  misc_feature (400)..(400): n is a, c, g, or t
  misc_feature (412)..(412): n is a, c, g, or t
tcctggtgccttctgttccttcctgnnnnnnnnnnnnnnnnnnnnnnnnnnnnnnnnnnnnnnnnnnnnnnnnnnnnnccannnnnnnnnnnnnnntccgtgagccctggtgtactggctgggattgttctgggtgacttggtgttgnnnnnnnnnnnnnnnnnnnnnnnnnnnnnnnnnnnnnnnntggtctcccgaggtcaagggacagcggaagggacccggaaacaacacattgctgagactgagtcgccttatcaggagcttcagggtcagagaccngaagtatacagtgacctcaacacacagannnnnnnnnnnnnnnnnnnncantnnnngcccatcagcggcctgatgcccggatccggtcattccagatgcctantnaacaagccctntntgggatcaggantcccgttggaatacagatccacagggtacc

SEQ ID NO: 3437 - DNA, 442 bp, Mus musculus; identical to SEQ ID NO: 3436
  misc_feature (26)..(78): n is a, c, g, or t
  misc_feature (82)..(96): n is a, c, g, or t
  misc_feature (148)..(187): n is a, c, g, or t
  misc_feature (282)..(282): n is a, c, g, or t
  misc_feature (311)..(330): n is a, c, g, or t
  misc_feature (333)..(333): n is a, c, g, or t
  misc_feature (335)..(338): n is a, c, g, or t
  misc_feature (385)..(385): n is a, c, g, or t
  misc_feature (387)..(387): n is a, c, g, or t
  misc_feature (398)..(398): n is a, c, g, or t
  misc_feature (400)..(400): n is a, c, g, or t
  misc_feature (412)..(412): n is a, c, g, or t

SEQ ID NO: 3438 - DNA, 321 bp, Mus musculus
  misc_feature (35)..(35): n is a, c, g, or t
  misc_feature (191)..(191): n is a, c, g, or t
  misc_feature (206)..(206): n is a, c, g, or t
  misc_feature (264)..(280): n is a, c, g, or t
gtccagtgcacactggcagatggtccctggcaggncctctgggtgacaggaaaggctacgatatggacactgcttggtgttgagggtgtcttgggctggtcataccacagaggcggcaggaacgcttgagttggtgtgtgggaggggataggggtcctcaccctcctgagggtgacatgtgccctgcatgnaatctagcctctggntttggcctcagtcattccttagagactagagtcattgggagaaggccagggtctgtgnnnnnnnnnnnnnnnnntggtctcagctgctcctggcgctgctcagctggccaatgga

SEQ ID NO: 3439 - DNA, 321 bp, Mus musculus; identical to SEQ ID NO: 3438
  misc_feature (35)..(35): n is a, c, g, or t
  misc_feature (191)..(191): n is a, c, g, or t
  misc_feature (206)..(206): n is a, c, g, or t
  misc_feature (264)..(280): n is a, c, g, or t

SEQ ID NO: 3440 - DNA, 505 bp, Mus musculus
  misc_feature (108)..(124): n is a, c, g, or t
  misc_feature (235)..(261): n is a, c, g, or t
  misc_feature (291)..(291): n is a, c, g, or t
  misc_feature (307)..(307): n is a, c, g, or t
  misc_feature (309)..(309): n is a, c, g, or t
  misc_feature (341)..(341): n is a, c, g, or t
  misc_feature (421)..(421): n is a, c, g, or t
gtggatccctatgctgaccccaacacatgcaaaggagattccgggggccctctcattgttcacaagagaagccgcttcattcaagttggtgtgattagctggggagtnnnnnnnnnnnnnnnnnaccagaggcggcaacagctggtaccctcttatgcccgggacttccacatcaacctcttccaggtgctgccctggctaaaggacaagctcaaagatgaggatttgggttttnnnnnnnnnnnnnnnnnnnnnnnnnnngtgaggacagattaaagcagttacaataanaaaaaaaaaaaaaaanantgggccgagctatcccttagtagggtattacntggatggcgcgtttacatcgtcctggaacactgggtcaacttaacgcttagaatcccttcgcatggtattgcgagccgcngtccgtcgaaattccgtgatggatgtgccccttttgcggattattgagcggggggggtgtttgtgtcgggtaatcgcgtcgctt

SEQ ID NO: 3441 - DNA, 303 bp, Mus musculus
  misc_feature (111)..(111): n is a, c, g, or t
  misc_feature (125)..(126): n is a, c, g, or t
  misc_feature (137)..(197): n is a, c, g, or t
gagaccgccctgtaccgaaagatgctaggcaaccccagccggctgcctgccaagtgtccgggaaagggggcctggtccatcccgtggaaatggctgtttggggcgactgcngtggccctgggggnngtggctctctnnnnnnnnnnnnnnnnnnnnnnnnnnnnnnnnnnnnnnnnnnnnnnnnnnnnnnnnnnnnnccctaactcccccaggctccctgtccattgccctccctggctgagatgcctcctatgggtttggggagcaaggattgagggtcaaataacccaagaagcaggaagg

SEQ ID NO: 3442 - DNA, 303 bp, Mus musculus; identical to SEQ ID NO: 3441
  misc_feature (111)..(111): n is a, c, g, or t
  misc_feature (125)..(126): n is a, c, g, or t
  misc_feature (137)..(197): n is a, c, g, or t

SEQ ID NO: 3443 - DNA, 178 bp, Mus musculus
cgtttgcagaccaggaggctgaactgctcggtaagccctggtatgctggcgcctgtgaccgcaagtctgctgaagaggccttgcacagatccaacaaggatggatcgtttcttattcggaagagctctggccatgattccaagcagccgtacaccctagttgcgttctttaacaagcg

SEQ ID NO: 3444 - DNA, 178 bp, Mus musculus; identical to SEQ ID NO: 3443

SEQ ID NO: 3445 - DNA, 237 bp, Mus musculus
ttgacagtcagaataacacgaaagattccacgagactgaaatatgctgtgaaggtttcataacgataccacggttccagacatgtcctctgtttcttcttttgagaaaacatcatattctggctatgactcctcagcagtaagagagaaaagatgaatgaagccactgaggcttcgtgaatgaatgaatctactccttcctagggcgttcacacgagcttttctatcacctgacctg

SEQ ID NO: 3446 - DNA, 237 bp, Mus musculus; identical to SEQ ID NO: 3445

SEQ ID NO: 3447 - DNA, 387 bp, Mus musculus
  misc_feature (102)..(163): n is a, c, g, or t
  misc_feature (188)..(188): n is a, c, g, or t
  misc_feature (192)..(192): n is a, c, g, or t
  misc_feature (207)..(207): n is a, c, g, or t
  misc_feature (215)..(215): n is a, c, g, or t
  misc_feature (241)..(241): n is a, c, g, or t
  misc_feature (250)..(250): n is a, c, g, or t
  misc_feature (284)..(284): n is a, c, g, or t
  misc_feature (301)..(301): n is a, c, g, or t
  misc_feature (332)..(332): n is a, c, g, or t
  misc_feature (343)..(344): n is a, c, g, or t
  misc_feature (353)..(353): n is a, c, g, or t
  misc_feature (355)..(355): n is a, c, g, or t
  misc_feature (359)..(359): n is a, c, g, or t
cactgcagtgtgagtgatgaacagagggcattgctgtgacaagctgaaagaactcaggtgggacctctctgcttcatggacacattttatggcatctggaannnnnnnnnnnnnnnnnnnnnnnnnnnnnnnnnnnnnnnnnnnnnnnnnnnnnnnnnnnnnnattggcgcccaacgtggggctgagnaacngcaaaggatttttgnaagagacnctgctggttcggagctccataaaatnaaggataanggaaattcataccggagaaggtatgggctaagcngagacagcgttaaaccngagcgctggttcacttaggttcagcagtgangagctgggtannaggcggtangncgtnagctctccgaagctacatgaggtgtgag

SEQ ID NO: 3448 - DNA, 387 bp, Mus musculus; identical to SEQ ID NO: 3447
  misc_feature (102)..(163): n is a, c, g, or t
  misc_feature (188)..(188): n is a, c, g, or t
  misc_feature (192)..(192): n is a, c, g, or t
  misc_feature (207)..(207): n is a, c, g, or t
  misc_feature (215)..(215): n is a, c, g, or t
  misc_feature (241)..(241): n is a, c, g, or t
  misc_feature (250)..(250): n is a, c, g, or t
  misc_feature (284)..(284): n is a, c, g, or t
  misc_feature (301)..(301): n is a, c, g, or t
  misc_feature (332)..(332): n is a, c, g, or t
  misc_feature (343)..(344): n is a, c, g, or t
  misc_feature (353)..(353): n is a, c, g, or t
  misc_feature (355)..(355): n is a, c, g, or t
  misc_feature (359)..(359): n is a, c, g, or t

SEQ ID NO: 3449 - DNA, 505 bp, Mus musculus
  misc_feature (312)..(356): n is a, c, g, or t
  misc_feature (429)..(465): n is a, c, g, or t
gttcactgctttaggccagcccactcctgcttccctctacagaggttctggcacccacgtcaagatggctcactgaagctctagagccatgtgacttcatggaaatggttttgtcttcctgctgattcagcctggtgcctgtgtgtgtccatccgctcagcacgtctgcatgcgggtcctgtccacacgtgtcgctaaatcggcggggaattgcctctcaaacagcgttgcacaaagcaccctcaagttcccagcaaagtacttgatctctttcaaatgtgtgttattgtctaggttctgtgaccactggtnnnnnnnnnnnnnnnnnnnnnnnnnnnnnnnnnnnnnnnnnnnnntctctgtatagtccccatcactaatgtcagaacccagcgtatgtagcatttgtattgcagtttccctggcttnnnnnnnnnnnnnnnnnnnnnnnnnnnnnnnnnnnnnttgccactgtacctgtgcaatactgctgtaaataactgca

SEQ ID NO: 3450 - DNA, 505 bp, Mus musculus; identical to SEQ ID NO: 3449
  misc_feature (312)..(356): n is a, c, g, or t
  misc_feature (429)..(465): n is a, c, g, or t

SEQ ID NO: 3451 - DNA, 118 bp, Mus musculus
  misc_feature (76)..(76): n is a, c, g, or t
gacacaaagttctgttcctgctcctgatgatgcctacccagaaatagaaaagttcttccctttcaatcctctagantttgagagttttgacctgcctgaggagcaccagatctcactt

SEQ ID NO: 3452 - DNA, 118 bp, Mus musculus; identical to SEQ ID NO: 3451
  misc_feature (76)..(76): n is a, c, g, or t

SEQ ID NO: 3453 - DNA, 610 bp, Mus musculus
  misc_feature (31)..(31): n is a, c, g, or t
  misc_feature (149)..(149): n is a, c, g, or t
  misc_feature (171)..(185): n is a, c, g, or t
  misc_feature (357)..(357): n is a, c, g, or t
  misc_feature (364)..(364): n is a, c, g, or t
  misc_feature (370)..(370): n is a, c, g, or t
  misc_feature (372)..(374): n is a, c, g, or t
  misc_feature (377)..(377): n is a, c, g, or t
  misc_feature (385)..(385): n is a, c, g, or t
  misc_feature (388)..(388): n is a, c, g, or t
  misc_feature (390)..(390): n is a, c, g, or t
  misc_feature (395)..(395): n is a, c, g, or t
  misc_feature (402)..(402): n is a, c, g, or t
  misc_feature (406)..(406): n is a, c, g, or t
  misc_feature (424)..(424): n is a, c, g, or t
  misc_feature (474)..(474): n is a, c, g, or t
  misc_feature (476)..(476): n is a, c, g, or t
tactccatgagcagatgaaggaggccgaagnatcgtttactgaatatgagaaagaaattgaggagctgaaagaactgctacctgaaattcgagagaagatagaagacgcaaaggaatctcagcggagtgggaatgtagccgaactggcnactgaaagctactctggtggannnnnnnnnnnnnnntttcactcctagtggagctggtgcctcagtatccatgattgccagtagaaaaccaacagatggcgcttcctcatcaaattgtgtgactgatatttcccatcttgtcagaaagaagaggaaaccagaggaagagagtccccggaaggatgatgcaaagaaagctaaacaaganccagagntgaatngnnncantggggatnctntntccantggaaangaantttcagaaaacatggagnccgaggctgagaatcaggctgagagccaaacagcagaggggaccgtggantntgcagctacaattaaaagcactgcatgttaagaggcgagcagaaccttcctcctgagggaaagtggttttgtacataatgtattttttcacttttggggattctttttgtataactccaataaagattgtaggc

SEQ ID NO: 3454 - DNA, 610 bp, Mus musculus; identical to SEQ ID NO: 3453
  misc_feature (31)..(31): n is a, c, g, or t
  misc_feature (149)..(149): n is a, c, g, or t
  misc_feature (171)..(185): n is a, c, g, or t
  misc_feature (357)..(357): n is a, c, g, or t
  misc_feature (364)..(364): n is a, c, g, or t
  misc_feature (370)..(370): n is a, c, g, or t
  misc_feature (372)..(374): n is a, c, g, or t
  misc_feature (377)..(377): n is a, c, g, or t
  misc_feature (385)..(385): n is a, c, g, or t
  misc_feature (388)..(388): n is a, c, g, or t
  misc_feature (390)..(390): n is a, c, g, or t
  misc_feature (395)..(395): n is a, c, g, or t
  misc_feature (402)..(402): n is a, c, g, or t
  misc_feature (406)..(406): n is a, c, g, or t
  misc_feature (424)..(424): n is a, c, g, or t
  misc_feature (474)..(474): n is a, c, g, or t
  misc_feature (476)..(476): n is a, c, g, or t

SEQ ID NO: 3455 - DNA, 578 bp, Mus musculus
  misc_feature (146)..(146): n is a, c, g, or t
  misc_feature (152)..(152): n is a, c, g, or t
  misc_feature (215)..(215): n is a, c, g, or t
  misc_feature (522)..(540): n is a, c, g, or t
cccctgagccagagtttgcctggacatcagtgcctcgtttttttatttttttattttttggactccctgtacactgtcctgttggggagagagaagctgggaagggctatgcttcgtcctgggtggaagacggctggcagttcccntcaggncctcatttaaacaccagcacctaaagaggacgggtggatcatgtggggctgtggccaggtcancctgctttctccatgtcctgctgacatctgaaactgtgcctatgaatgtgatttgaacacaggagccccttcctcacaaacccggagcacccactgcctggcctggccctaactgtgggaggggcgccaggctccccaggctgagctgcttgtctgggcttgcttgtgggcaccttcagccagtgctgcagaccaccctgaaatagctgacccagttggtctgcgcctacctcctgccaagcaagctctgtgctgtcactcagacacctgtggcatgcagaggccgcccatcctcgagcctagaaannnnnnnnnnnnnnnnnnnaacctgctgggcaagtgggcctatccaagttcggttat

SEQ ID NO: 3456 - DNA, 578 bp, Mus musculus; identical to SEQ ID NO: 3455
  misc_feature (146)..(146): n is a, c, g, or t
  misc_feature (152)..(152): n is a, c, g, or t
  misc_feature (215)..(215): n is a, c, g, or t
  misc_feature (522)..(540): n is a, c, g, or t

SEQ ID NO: 3457 - DNA, 41 bp, Mus musculus
aatccgtaactgtgtttgcacgcttgagaagattcaagctt

SEQ ID NO: 3458 - DNA, 41 bp, Mus musculus; identical to SEQ ID NO: 3457

SEQ ID NO: 3459 - DNA, 462 bp, Mus musculus
  misc_feature (46)..(46): n is a, c, g, or t
  misc_feature (52)..(155): n is a, c, g, or t
  misc_feature (172)..(207): n is a, c, g, or t
  misc_feature (335)..(398): n is a, c, g, or t
gacagaatacacagggcctgagagctacgtggctcagatgatcacnggagannnnnnnnnnnnnnnnnnnnnnnnnnnnnnnnnnnnnnnnnnnnnnnnnnnnnnnnnnnnnnnnnnnnnnnnnnnnnnnnnnnnnnnnnnnnnnnnnnnnnnnngtctacgatgagtctgnnnnnnnnnnnnnnnnnnnnnnnnnnnnnnnnnnnngagcagatgacagaacaaaggaaaaacaagcaaaggctgggctttcttggatcaaacacaccccatgtgaaccatcacatgccaccgcactgacaccatgggggcacgccgtgaccagcctttcatcnnnnnnnnnnnnnnnnnnnnnnnnnnnnnnnnnnnnnnnnnnnnnnnnnnnnnnnnnnnnnnnngctaaaaacaaccaagtgccaagatgctgagccatttagctcccagaacaatccgtaactgtgt

SEQ ID NO: 3460 - DNA, 462 bp, Mus musculus; identical to SEQ ID NO: 3459
  misc_feature (46)..(46): n is a, c, g, or t
  misc_feature (52)..(155): n is a, c, g, or t
  misc_feature (172)..(207): n is a, c, g, or t
  misc_feature (335)..(398): n is a, c, g, or t

SEQ ID NO: 3461 - DNA, 426 bp, Mus musculus
  misc_feature (83)..(84): n is a, c, g, or t
  misc_feature (90)..(91): n is a, c, g, or t
  misc_feature (93)..(95): n is a, c, g, or t
  misc_feature (97)..(97): n is a, c, g, or t
  misc_feature (106)..(106): n is a, c, g, or t
  misc_feature (109)..(109): n is a, c, g, or t
  misc_feature (118)..(118): n is a, c, g, or t
  misc_feature (122)..(122): n is a, c, g, or t
  misc_feature (128)..(128): n is a, c, g, or t
  misc_feature (130)..(130): n is a, c, g, or t
  misc_feature (133)..(133): n is a, c, g, or t
  misc_feature (136)..(136): n is a, c, g, or t
  misc_feature (139)..(139): n is a, c, g, or t
  misc_feature (150)..(150): n is a, c, g, or t
  misc_feature (158)..(158): n is a, c, g, or t
  misc_feature (160)..(160): n is a, c, g, or t
  misc_feature (162)..(162): n is a, c, g, or t
  misc_feature (173)..(173): n is a, c, g, or t
  misc_feature (178)..(178): n is a, c, g, or t
  misc_feature (185)..(185): n is a, c, g, or t
  misc_feature (190)..(190): n is a, c, g, or t
  misc_feature (194)..(194): n is a, c, g, or t
  misc_feature (197)..(197): n is a, c, g, or t
  misc_feature (203)..(203): n is a, c, g, or t
  misc_feature (205)..(205): n is a, c, g, or t
  misc_feature (211)..(211): n is a, c, g, or t
  misc_feature (214)..(215): n is a, c, g, or t
  misc_feature (221)..(221): n is a, c, g, or t
  misc_feature (237)..(237): n is a, c, g, or t
  misc_feature (242)..(242): n is a, c, g, or t
  misc_feature (244)..(244): n is a, c, g, or t
  misc_feature (252)..(252): n is a, c, g, or t
  misc_feature (254)..(255): n is a, c, g, or t
  misc_feature (261)..(261): n is a, c, g, or t
  misc_feature (295)..(295): n is a, c, g, or t
  misc_feature (298)..(298): n is a, c, g, or t
  misc_feature (314)..(314): n is a, c, g, or t
  misc_feature (316)..(316): n is a, c, g, or t
  misc_feature (353)..(353): n is a, c, g, or t
  misc_feature (395)..(395): n is a, c, g, or t
  misc_feature (401)..(401): n is a, c, g, or t
gagtgggatggcttcttcagcaccactgtcaccaaccctgagcccatgggcaagcagggtcgggtgctccacccggagcagcnncgggtnntnnntnttcgggaangtncccgctccnaggnctttcnanatngcnacnggttcttcggnaacatccngnancagacaccggncaggngggtaangctgngccnacnaccccngnccaaanccnntggccntggagattaagctctncctgntntccagtgntnnggagangcgcatcagctgcagttaaagcaaaagaggaggntgntaccaaggactagtgntntcacccagagccccacgtgcactgatgtttttaaccntttgagccccatcatttgaagtcttgtgctcagtgtctgtgnccatgnctgacactaagctgtttgtatgagg

SEQ ID NO: 3462 - DNA, 426 bp, Mus musculus; identical to SEQ ID NO: 3461
  misc_feature (83)..(84): n is a, c, g, or t
  misc_feature (90)..(91): n is a, c, g, or t
  misc_feature (93)..(95): n is a, c, g, or t
  misc_feature (97)..(97): n is a, c, g, or t
  misc_feature (106)..(106): n is a, c, g, or t
  misc_feature (109)..(109): n is a, c, g, or t
  misc_feature (118)..(118): n is a, c, g, or t
  misc_feature (122)..(122): n is a, c, g, or t
  misc_feature (128)..(128): n is a, c, g, or t
  misc_feature (130)..(130): n is a, c, g, or t
  misc_feature (133)..(133): n is a, c, g, or t
  misc_feature (136)..(136): n is a, c, g, or t
  misc_feature (139)..(139): n is a, c, g, or t
  misc_feature (150)..(150): n is a, c, g, or t
  misc_feature (158)..(158): n is a, c, g, or t
  misc_feature (160)..(160): n is a, c, g, or t
  misc_feature (162)..(162): n is a, c, g, or t
  misc_feature (173)..(173): n is a, c, g, or t
  misc_feature (178)..(178): n is a, c, g, or t
  misc_feature (185)..(185): n is a, c, g, or t
  misc_feature (190)..(190): n is a, c, g, or t
  misc_feature (194)..(194): n is a, c, g, or t
  misc_feature (197)..(197): n is a, c, g, or t
  misc_feature (203)..(203): n is a, c, g, or t
  misc_feature (205)..(205): n is a, c, g, or t
  misc_feature (211)..(211): n is a, c, g, or t
  misc_feature (214)..(215): n is a, c, g, or t
  misc_feature (221)..(221): n is a, c, g, or t
  misc_feature (237)..(237): n is a, c, g, or t
  misc_feature (242)..(242): n is a, c, g, or t
  misc_feature (244)..(244): n is a, c, g, or t
  misc_feature (252)..(252): n is a, c, g, or t
  misc_feature (254)..(255): n is a, c, g, or t
  misc_feature (261)..(261): n is a, c, g, or t
  misc_feature (295)..(295): n is a, c, g, or t
  misc_feature (298)..(298): n is a, c, g, or t
  misc_feature (314)..(314): n is a, c, g, or t
  misc_feature (316)..(316): n is a, c, g, or t
  misc_feature (353)..(353): n is a, c, g, or t
  misc_feature (395)..(395): n is a, c, g, or t
  misc_feature (401)..(401): n is a, c, g, or t

SEQ ID NO: 3463 - DNA, 430 bp, Mus musculus
  misc_feature (153)..(154): n is a, c, g, or t
  misc_feature (357)..(358): n is a, c, g, or t
  misc_feature (361)..(362): n is a, c, g, or t
  misc_feature (364)..(364): n is a, c, g, or t
  misc_feature (368)..(368): n is a, c, g, or t
  misc_feature (397)..(397): n is a, c, g, or t
  misc_feature (403)..(403): n is a, c, g, or t
gagctggtccccatggttgaattggaagaggccatagcaccaggcactgaggctcagggtggtgctggctctagtggggacttggaggtgtccctaatggtacagctccagcagctaccactagggggcaacggagaagaagggggtcacccnnagccattaataatcagtactcatttgtgtgagatacctgcccaccctccattttcctgctcccagccttaagttgtgagactgagctgggtaggaacacagaggaaagtgggagtcccctccctacatgcttcctgacccttgtcagccaagggtgtgtatgttggtacaagttgaggttcatgagccctgttaagtccccanntannanacantacaggtgcccttgccccaggccaagganttgggntccgttacctccctgaggggctcttat

SEQ ID NO: 3464 - DNA, 430 bp, Mus musculus; identical to SEQ ID NO: 3463
  misc_feature (153)..(154): n is a, c, g, or t
  misc_feature (357)..(358): n is a, c, g, or t
  misc_feature (361)..(362): n is a, c, g, or t
  misc_feature (364)..(364): n is a, c, g, or t
  misc_feature (368)..(368): n is a, c, g, or t
  misc_feature (397)..(397): n is a, c, g, or t
  misc_feature (403)..(403): n is a, c, g, or t

SEQ ID NO: 3465 - DNA, 449 bp, Mus musculus
  misc_feature (262)..(262): n is a, c, g, or t
  misc_feature (264)..(264): n is a, c, g, or t
  misc_feature (274)..(274): n is a, c, g, or t
  misc_feature (294)..(294): n is a, c, g, or t
  misc_feature (301)..(301): n is a, c, g, or t
  misc_feature (312)..(312): n is a, c, g, or t
  misc_feature (318)..(318): n is a, c, g, or t
  misc_feature (321)..(321): n is a, c, g, or t
  misc_feature (339)..(339): n is a, c, g, or t
  misc_feature (369)..(369): n is a, c, g, or t
  misc_feature (377)..(377): n is a, c, g, or t
  misc_feature (382)..(382): n is a, c, g, or t
  misc_feature (384)..(384): n is a, c, g, or t
  misc_feature (386)..(386): n is a, c, g, or t
ggtgcttttcctaatactcgcttatatcatgtgctgccgacgggaaggagtggaaaagagagacatgcaaaccccagatatccagcttgtccatcacagctcgattcagaaatctaccaaggagcttcgagacatgtccaaaaacagagagattgcatggcccctgtctaccctgcccgtgttccaccctgtaactggggaggttatacctcccacgcacacagacaactacgacagcaccaacatgccgttgatgcaggcncngcagaacttnccacaccagactcagatccntcaaccncagactacagntaaatngtntccctgaagaaagaaagntgacagaagcaatgagtttataatcagcantgctgcanccgtntntnacccctttcccttccaataatgcatgagctttcctgacatcggttacgcatgcccactgtgtt

SEQ ID NO: 3466 - DNA, 449 bp, Mus musculus; identical to SEQ ID NO: 3465
  misc_feature (262)..(262): n is a, c, g, or t
  misc_feature (264)..(264): n is a, c, g, or t
  misc_feature (274)..(274): n is a, c, g, or t
  misc_feature (294)..(294): n is a, c, g, or t
  misc_feature (301)..(301): n is a, c, g, or t
  misc_feature (312)..(312): n is a, c, g, or t
  misc_feature (318)..(318): n is a, c, g, or t
  misc_feature (321)..(321): n is a, c, g, or t
  misc_feature (339)..(339): n is a, c, g, or t
  misc_feature (369)..(369): n is a, c, g, or t
  misc_feature (377)..(377): n is a, c, g, or t
  misc_feature (382)..(382): n is a, c, g, or t
  misc_feature (384)..(384): n is a, c, g, or t
  misc_feature (386)..(386): n is a, c, g, or t

SEQ ID NO: 3467 - DNA, 390 bp, Mus musculus
  misc_feature (140)..(140): n is a, c, g, or t
  misc_feature (208)..(208): n is a, c, g, or t
  misc_feature (233)..(266): n is a, c, g, or t
tcttctactggaacgcaaaggctccccacaaacagaaaaaggagcaatagagctgagctcgcttctagaacaattccatttccactcatcctcagagtcctccccacatgacttgatctgcgggtgcagtgtaagcaccntccattcctctaactgcagcctcctgagccagggttgtgggagcagtaaagcttgtgtaggccctgcnttcactcactcacttccccagatcnnnnnnnnnnnnnnnnnnnnnnnnnnnnnnnnnngctctggccctgtccacttaccttccttttggaccaaggacagagcctagaaaactgtggttggaagctagtggctgcttccctgtgctgcccgggtgggatggtctattggagcccagttctg

SEQ ID NO: 3468 - DNA, 586 bp, Mus musculus
  misc_feature (26)..(40): n is a, c, g, or t
  misc_feature (78)..(78): n is a, c, g, or t
  misc_feature (80)..(107): n is a, c, g, or t
  misc_feature (215)..(215): n is a, c, g, or t
  misc_feature (218)..(218): n is a, c, g, or t
  misc_feature (222)..(222): n is a, c, g, or t
  misc_feature (273)..(294): n is a, c, g, or t
  misc_feature (399)..(409): n is a, c, g, or t
  misc_feature (421)..(421): n is a, c, g, or t
  misc_feature (472)..(486): n is a, c, g, or t
  misc_feature (537)..(537): n is a, c, g, or t
  misc_feature (557)..(557): n is a, c, g, or t
tcctgtgaagggtcactgcttgtggnnnnnnnnnnnnnnntggctgatgactggggaagtttcttcacggctggtgcntnnnnnnnnnnnnnnnnnnnnnnnnnnnnacactgcccagccacactacagtcaggtgcgggtgcatcttttaaatgttctgcctttgaagactcataacattgctcctgtcacactcctgccgagagcaggcaaanacntgcntgggtttaaggaaaggggataagttgttagaaacagctctgtgagatgcannnnnnnnnnnnnnnnnnnnnnaaacacatagaagactttttggttgggtcgagagcctagaaggagtggaaccagaagacagagggtatgagcataaaataaaattattgttaatgtcttaaaaannnnnnnnnnnatctgtcacgtntcaggaaccctgcttggtattagatgatagttattggtgatcacagccacnnnnnnnnnnnnnnncctgcaccaatgtattggagggtactgagcctcagaacaataaacagcttntcaggctaagatgtggaagngcagaggtttagtcattccttcagtgaca

SEQ ID NO: 3469 - DNA, 586 bp, Mus musculus; identical to SEQ ID NO: 3468
  misc_feature (26)..(40): n is a, c, g, or t
  misc_feature (78)..(78): n is a, c, g, or t
  misc_feature (80)..(107): n is a, c, g, or t
  misc_feature (215)..(215): n is a, c, g, or t
  misc_feature (218)..(218): n is a, c, g, or t
  misc_feature (222)..(222): n is a, c, g, or t
  misc_feature (273)..(294): n is a, c, g, or t
  misc_feature (399)..(409): n is a, c, g, or t
  misc_feature (421)..(421): n is a, c, g, or t
  misc_feature (472)..(486): n is a, c, g, or t
  misc_feature (537)..(537): n is a, c, g, or t
  misc_feature (557)..(557): n is a, c, g, or t

SEQ ID NO: 3470 - DNA, 570 bp, Mus musculus
  misc_feature (40)..(40): n is a, c, g, or t
  misc_feature (48)..(48): n is a, c, g, or t
  misc_feature (58)..(58): n is a, c, g, or t
  misc_feature (64)..(64): n is a, c, g, or t
  misc_feature (69)..(69): n is a, c, g, or t
  misc_feature (78)..(79): n is a, c, g, or t
  misc_feature (82)..(82): n is a, c, g, or t
  misc_feature (100)..(100): n is a, c, g, or t
  misc_feature (221)..(236): n is a, c, g, or t
ggaaatgaacacttatcctgtttttcaaataagaaagctntcttccgnggggtacccnccatgnggacnggagttttnncanacacaccttctaactttnctaaagtagatttaaagtgtattccaggattgtaggctgttggagctccagcactctgaagctggcttccttcactgtacttttttaccatgttccttttttacaaatattgagattagannnnnnnnnnnnnnnngaatcagagaggttaaacaacttactgtcttcaactgttagcttcatcaagattaagatactcgattcattgttgcagaagactctcttctcttttcctgtccctccaatcctgttagttattaatgtttgtgtatttgtaaaactggttcaccattcaccctgtgttaaaactgtagttcttggttttttgttgttgggagtttttgtgtgcagtgggtgggggggataaaaacttgaggcatgtaaatttttattagtaacagtagtttgtaaagaagtaaaaggcttttgtaatccaggttttgtttttgcagatcacatttctttgttgg

SEQ ID NO: 3471 - DNA, 570 bp, Mus musculus; identical to SEQ ID NO: 3470
  misc_feature (40)..(40): n is a, c, g, or t
  misc_feature (48)..(48): n is a, c, g, or t
  misc_feature (58)..(58): n is a, c, g, or t
  misc_feature (64)..(64): n is a, c, g, or t
  misc_feature (69)..(69): n is a, c, g, or t
  misc_feature (78)..(79): n is a, c, g, or t
  misc_feature (82)..(82): n is a, c, g, or t
  misc_feature (100)..(100): n is a, c, g, or t
  misc_feature (221)..(236): n is a, c, g, or t

SEQ ID NO: 3472 - DNA, 483 bp, Mus musculus
  misc_feature (366)..(381): n is a, c, g, or t
gcaggttgccaccttcccaggctggccatcagcccctgtagaaggtgtagacaaacacccacagctgatgtaactaatgcgtttactagcctcaaaagaagctgatgcatgcattagcacacctagtaattaacttacttgtgaagggccttgccgagtagttagggaacttcctgcatcctgggcttacaggcatgatcttacctagattgacaaataactgaggcacatgcctggaattctagcacttgggaattggaggcagaaggattacaggttcaaggacagcctgtgctacgaagcacaacccacatcaagccgcgagtctaaagcaaaactgtgaagcgccaagaggaccagggtgcnnnnnnnnnnnnnnnngcgatgtgacagtagagccagagagcaccatccagtgggcctacccgctgctgtctccagtgctggtgtgcaatggtggttatagtacacacagactgatga

SEQ ID NO: 3473 - DNA, 483 bp, Mus musculus; identical to SEQ ID NO: 3472
  misc_feature (366)..(381): n is a, c, g, or t

SEQ ID NO: 3474 - DNA, 547 bp, Mus musculus
  misc_feature (34)..(50): n is a, c, g, or t
  misc_feature (142)..(161): n is a, c, g, or t
  misc_feature (229)..(299): n is a, c, g, or t
  misc_feature (472)..(486): n is a, c, g, or t
catccccaagggaacaacagtagtaacgtcactnnnnnnnnnnnnnnnnnacagcaaggagttccccaacccagagatgtttgaccctggccactttctagacgctaatggaaactttaagaaaagtgactacttcatgacnnnnnnnnnnnnnnnnnnnntttgtgctggagagggcctggcccgcatggagctgtttctaatcctgaccaccattttacagaacttnnnnnnnnnnnnnnnnnnnnnnnnnnnnnnnnnnnnnnnnnnnnnnnnnnnnnnnnnnnnnnnnnnnnnnncaccccattaccagctctgcttcattcctctctaaagagatcacacattctgaaccctcctgtgttgccttctgtaatccccccccccaggtttttattcacctctttccttatcagggataaggcatcttccatcctggctcacagaacccccttttctgaaaacctagcannnnnnnnnnnnnnntggagttatagcacaaatgcacttgtattatctcttttatataacagttgtctgagccctt

SEQ ID NO: 3475 - DNA, 547 bp, Mus musculus; identical to SEQ ID NO: 3474
  misc_feature (34)..(50): n is a, c, g, or t
  misc_feature (142)..(161): n is a, c, g, or t
  misc_feature (229)..(299): n is a, c, g, or t
  misc_feature (472)..(486): n is a, c, g, or t

SEQ ID NO: 3476 - DNA, 579 bp, Mus musculus
  misc_feature (28)..(28): n is a, c, g, or t
  misc_feature (45)..(45): n is a, c, g, or t
  misc_feature (52)..(52): n is a, c, g, or t
  misc_feature (57)..(57): n is a, c, g, or t
  misc_feature (61)..(61): n is a, c, g, or t
  misc_feature (63)..(63): n is a, c, g, or t
  misc_feature (65)..(66): n is a, c, g, or t
  misc_feature (426)..(426): n is a, c, g, or t
agcacgcgccaacagtaacgtgtgtgcncccactcggtgggcggngggggcngggangggnanannaggttgtaacaatctattcacaagcctcctgtacctcagtggatcttcagacctgccattgctgcccacgggagacggcttctctgcagtaaacacatttgggaccttccttttttcaatatgcaagcagctttttatttcctttacccgaacccttaactgacatgggcctctgcaaaccttaatgacaacacttaatagcaacaggacactcgagaattgagtctcttcgttctctgcctttttctctcctctgccttccctctctgccctctccccttccacttccacgctctcctttctctcttttctgctttacagtggaaaaatgtttgtgaacgcccatctgggaagccttcntttttaaaaaaaaaaaaaaaaatcagattgacttaatggctgcccctggggctcctcatcaccccgcatacacctgcctgacaccgtaggtcttttaaaaaaaagaaaaggaaagaaaaagaaaaaaaattcacacactgagatggaattttt

SEQ ID NO: 3477 - DNA, 579 bp, Mus musculus; identical to SEQ ID NO: 3476
  misc_feature (28)..(28): n is a, c, g, or t
  misc_feature (45)..(45): n is a, c, g, or t
  misc_feature (52)..(52): n is a, c, g, or t
  misc_feature (57)..(57): n is a, c, g, or t
  misc_feature (61)..(61): n is a, c, g, or t
  misc_feature (63)..(63): n is a, c, g, or t
  misc_feature (65)..(66): n is a, c, g, or t
  misc_feature (426)..(426): n is a, c, g, or t

SEQ ID NO: 3478 - DNA, 465 bp, Mus musculus
  misc_feature (62)..(115): n is a, c, g, or t
  misc_feature (351)..(375): n is a, c, g, or t
tcttccaaggcaaggaacaaggaaaagcatctttttgcccacaaaagtttagggctccccgnnnnnnnnnnnnnnnnnnnnnnnnnnnnnnnnnnnnnnnnnnnnnnnnnnnnnnacacacaagccttccccaccctatcccaatagaccctattcctccatcaaaatcaaagctaactcctggcctgccacattgcttcttcttgctccagcctgttaaacctccaataaatgtcagatctgtgggaagccttcctcactctcactccacagtttgtacagagagcgagagcctcgtttggttctacttacaaggaaggctttgtgtctgtctgtccttcccaactgacnnnnnnnnnnnnnnnnnnnnnnnnnatgaaagcgttgactcacctggatgttgtcattaattaatagtgatacaaaatattgacacttcttttcctgcttctttgttatgcagcc

SEQ ID NO: 3479 - DNA, 465 bp, Mus musculus; identical to SEQ ID NO: 3478
  misc_feature (62)..(115): n is a, c, g, or t
  misc_feature (351)..(375): n is a, c, g, or t

SEQ ID NO: 3480 - DNA, 314 bp, Mus musculus
  misc_feature (28)..(49): n is a, c, g, or t
cacagacagctacaaagccctcgtggannnnnnnnnnnnnnnnnnnnnncaggatccacagagaaaccctcttgcttgcttctctgggtctagtgactgaatttttagggattctctttttggctgccacagtcagagttgtcccctggcctagaggtctggcgcccctctgcttcggccagatgtgctctctgtcccccacctctcaccacatccatccgcccactgggagtcaggctcctgaggtgagccacgaggctatgaaatcagccatgatagtagaagcctgctcctatcagttgatgtaaatgtaa

SEQ ID NO: 3481 - DNA, 314 bp, Mus musculus; identical to SEQ ID NO: 3480
  misc_feature (28)..(49): n is a, c, g, or t

SEQ ID NO: 3482 - DNA, 471 bp, Mus musculus
  misc_feature (44)..(44): n is a, c, g, or t
  misc_feature (264)..(264): n is a, c, g, or t
  misc_feature (281)..(296): n is a, c, g, or t
  misc_feature (308)..(308): n is a, c, g, or t
  misc_feature (312)..(313): n is a, c, g, or t
taaaccttcttgctcctctggagggagcatggcctggcttagcngagtgactggactgtgtgagattgggggcatcgcttttcctctctgagcctcagctgacagcatatgggaccacaaagggcttgatccaaaccacagggattgacagtgccagccacagctgtgtccagggctcgtgttctgccagaaggagcacctggacgaccagggccaccactagtgctactttgctcactgcccatgcatgtcctgaaggtcccntccccctcctctcctannnnnnnnnnnnnnnntgctcgccaatnatanntgacttgggtccttgtcctctgtgttgctgtgaaatagaacggggccttcctttacccagacttgccctcctccagggtctgacccctccatggaaaaggaaggtttgagggatggtgggaaatgggatgtgcacctattgtgccatgtgtcattggt

SEQ ID NO: 3483 - DNA, 471 bp, Mus musculus; identical to SEQ ID NO: 3482
  misc_feature (44)..(44): n is a, c, g, or t
  misc_feature (264)..(264): n is a, c, g, or t
  misc_feature (281)..(296): n is a, c, g, or t
  misc_feature (308)..(308): n is a, c, g, or t
  misc_feature (312)..(313): n is a, c, g, or t

SEQ ID NO: 3484 - DNA, 427 bp, Mus musculus
  misc_feature (82)..(82): n is a, c, g, or t
  misc_feature (169)..(203): n is a, c, g, or t
  misc_feature (281)..(281): n is a, c, g, or t
  misc_feature (305)..(305): n is a, c, g, or t
  misc_feature (317)..(317): n is a, c, g, or t
  misc_feature (341)..(341): n is a, c, g, or t
  misc_feature (388)..(388): n is a, c, g, or t
  misc_feature (391)..(391): n is a, c, g, or t
tcctgtttgagagaggactgcacttaagcccctcctgggtctgagtctacatgctgctcctaggccccacaagccaagggcncttcctaactacccattccacccaggaccagaggccgagggaaaggtttgggctctgctattcaggaaggctgatggctgggctccnnnnnnnnnnnnnnnnnnnnnnnnnnnnnnnnnnnccagtcaccagtccagattgtgcttccttcagattgtacatgctagggccagaactgcctgctgtgggcctgggattntactccagaagacaagagcccatntgactggggccnccatcccagtagccactgggctcntccttcaacaggccatccagcgcatgtccctgttacccgctgcactnatnatgaagccgctggccactgccatgtgtgttgcacac

SEQ ID NO: 3485 - DNA, 427 bp, Mus musculus; identical to SEQ ID NO: 3484
  misc_feature (82)..(82): n is a, c, g, or t
  misc_feature (169)..(203): n is a, c, g, or t
  misc_feature (281)..(281): n is a, c, g, or t
  misc_feature (305)..(305): n is a, c, g, or t
  misc_feature (317)..(317): n is a, c, g, or t
  misc_feature (341)..(341): n is a, c, g, or t
  misc_feature (388)..(388): n is a, c, g, or t
  misc_feature (391)..(391): n is a, c, g, or t

SEQ ID NO: 3486 - DNA, 333 bp, Mus musculus
  misc_feature (127)..(141): n is a, c, g, or t
  misc_feature (158)..(158): n is a, c, g, or t
  misc_feature (162)..(162): n is a, c, g, or t
cctgtccctctatgacaggacacagaggccctcaggggagacatggagggagcaggccactgccgatgggggtcccagctccctccagcaagactcctctgtgcctgactggccacaggcaactgannnnnnnnnnnnnnnacttaaaaaaggcccanagtnggggatggccagaagatgggatatgtggttcccagggaggtcttcggaagctgtggaggggaaatggtggcttctggtagagtccttttggttactgccccttcctgggccccaggctcggtgtgccttatttgtgtactgtgtgagtcactagcctggagcagaaagagg

SEQ ID NO: 3487 - DNA, 333 bp, Mus musculus; identical to SEQ ID NO: 3486
  misc_feature (127)..(141): n is a, c, g, or t
  misc_feature (158)..(158): n is a, c, g, or t
  misc_feature (162)..(162): n is a, c, g, or t

SEQ ID NO: 3488 - DNA, 547 bp, Mus musculus
cacgcaaacaggaaagtttgtgtgtagatgaagacatgaactgtgggcataaaatggttgagccagttgtcttcctgtgtgaaatccgaatgatgtactattttccgtgcgttgggatagtctgtttattagggttattgagatggaggtcacgcaaggaactgactgttctcatgtctacctgactttttttttgttttggtctagtatgtttagtaatttctgacagttgcataatggcagcacacaacacagcacagcttagttttgttgggccgtctgacctgcttcagccattcagcctgcagctgtgatgttggaggtgggctgggttgttaaactttgcctgaatgtccaggttgtgacatctgtccggaaagattctcctttccttcctgcccagcattgatctagaagcagaagaagaatcttggtgcctttcaaagattagggtgtggtttgttttctctccctcttcgagcgtcctcgcgtcccttggtgtgtcgcttgccttgccccgtgtccgcctgtccctttttgtggttct

SEQ ID NO: 3489 - DNA, 547 bp, Mus musculus; identical to SEQ ID NO: 3488

SEQ ID NO: 3490 - DNA, 342 bp, Mus musculus
  misc_feature (26)..(26): n is a, c, g, or t
  misc_feature (215)..(215): n is a, c, g, or t
  misc_feature (218)..(218): n is a, c, g, or t
  misc_feature (220)..(220): n is a, c, g, or t
  misc_feature (222)..(222): n is a, c, g, or t
  misc_feature (227)..(228): n is a, c, g, or t
  misc_feature (231)..(231): n is a, c, g, or t
  misc_feature (245)..(245): n is a, c, g, or t
  misc_feature (251)..(251): n is a, c, g, or t
  misc_feature (253)..(253): n is a, c, g, or t
  misc_feature (255)..(255): n is a, c, g, or t
  misc_feature (270)..(270): n is a, c, g, or t
  misc_feature (272)..(272): n is a, c, g, or t
  misc_feature (286)..(286): n is a, c, g, or t
  misc_feature (288)..(288): n is a, c, g, or t
acgccgaggacgaccctgagcggacncatcagatggttttactgaggaagctctgtctccccatgctgtgcttcctgcttcacaccatactgcacagcaccggacagtaccaggagtgcctgcagctggccgacatggtgtcctctgagcgccacaagctctatctggtgttttctaaggaagaactaaggaaactgctgcagaagttaagggantcntntntaatnntcntagaccaggggctngacccncntnggctatgaaattcantnataactcaccattntntgatgcccatgactagaggaggatgcttgcttgcttcgttgagttgcttggttg

SEQ ID NO: 3491 - DNA, 342 bp, Mus musculus; identical to SEQ ID NO: 3490
  misc_feature (26)..(26): n is a, c, g, or t
  misc_feature (215)..(215): n is a, c, g, or t
  misc_feature (218)..(218): n is a, c, g, or t
  misc_feature (220)..(220): n is a, c, g, or t
  misc_feature (222)..(222): n is a, c, g, or t
  misc_feature (227)..(228): n is a, c, g, or t
  misc_feature (231)..(231): n is a, c, g, or t
  misc_feature (245)..(245): n is a, c, g, or t
  misc_feature (251)..(251): n is a, c, g, or t
  misc_feature (253)..(253): n is a, c, g, or t
  misc_feature (255)..(255): n is a, c, g, or t
  misc_feature (270)..(270): n is a, c, g, or t
  misc_feature (272)..(272): n is a, c, g, or t
  misc_feature (286)..(286): n is a, c, g, or t
  misc_feature (288)..(288): n is a, c, g, or t

SEQ ID NO: 3492 - DNA, 431 bp, Mus musculus
  misc_feature (105)..(105): n is a, c, g, or t
  misc_feature (110)..(110): n is a, c, g, or t
  misc_feature (113)..(113): n is a, c, g, or t
  misc_feature (124)..(124): n is a, c, g, or t
  misc_feature (128)..(128): n is a, c, g, or t
  misc_feature (163)..(163): n is a, c, g, or t
  misc_feature (221)..(221): n is a, c, g, or t
  misc_feature (266)..(266): n is a, c, g, or t
agctgccagtctctgggctgctgtctccgctgtcctcggcgttgcactccagattcaggaacaagtgtcatttacacacgtggcaagtgaattcacacaaggtgncatgnacnccagagggcangggnttttaactgaactttgtaggatttccagttgtccnaggactttaaaatcctgtttcagggagtgtatctcctatgtgttttaaaggaggtgantctctgaatgtgccttgcagtactgtaattcaaaaataggttctntttggctgcggcggaaagttttctaaaacaaagcgttaggaaggaattttgtgctaacattaaaattataattttttaaggtattagatatttcagaagtaagatctggtggttctaaactagtaagtgtaatggtaaatttctaactcttagaaaaattcggag

SEQ ID NO: 3493 - DNA, 431 bp, Mus musculus; identical to SEQ ID NO: 3492
  misc_feature (105)..(105): n is a, c, g, or t
  misc_feature (110)..(110): n is a, c, g, or t
  misc_feature (113)..(113): n is a, c, g, or t
  misc_feature (124)..(124): n is a, c, g, or t
  misc_feature (128)..(128): n is a, c, g, or t
  misc_feature (163)..(163): n is a, c, g, or t
  misc_feature (221)..(221): n is a, c, g, or t
  misc_feature (266)..(266): n is a, c, g, or t

SEQ ID NO: 3494 - DNA, 244 bp, Mus musculus
  misc_feature (26)..(26): n is a, c, g, or t
  misc_feature (29)..(29): n is a, c, g, or t
  misc_feature (39)..(62): n is a, c, g, or t
tctaccgcatcctacagccagatgtnaancggcggctgnnnnnnnnnnnnnnnnnnnnnnnntcatggctacagccccccaagcccaaagccatgtcttctgcctccttcaagagggagggggaaggcaagtatcgagctgattgcaagttggatactcgaccaggctccagacccgaacaccggcctgaccacaagctggcgaccaaaccccagcaacggatgctggtgacacccgagaatga

SEQ ID NO: 3495 - DNA, 244 bp, Mus musculus; identical to SEQ ID NO: 3494
  misc_feature (26)..(26): n is a, c, g, or t
  misc_feature (29)..(29): n is a, c, g, or t
  misc_feature (39)..(62): n is a, c, g, or t

SEQ ID NO: 3496 - DNA, 216 bp, Mus musculus
  misc_feature (44)..(44): n is a, c, g, or t
cgtctctttgagtccaagatcacccaagtcctgcatttcagaanggacaccatggcctccataggtcagacccgcaacttcctgagccgggcctcttgccgccttcgtttggagcctaacaaagagtacttgatcatggggatggacggggaaaccagtgacaacaagggagacccccagtacttgctggactcaaatacctggattgaggagatg

SEQ ID NO: 3497 - DNA, 359 bp, Mus musculus
  misc_feature (30)..(30): n is a, c, g, or t
  misc_feature (32)..(32): n is a, c, g, or t
  misc_feature (35)..(36): n is a, c, g, or t
  misc_feature (83)..(98): n is a, c, g, or t
  misc_feature (115)..(142): n is a, c, g, or t
  misc_feature (252)..(252): n is a, c, g, or t
  misc_feature (259)..(259): n is a, c, g, or t
  misc_feature (265)..(265): n is a, c, g, or t
  misc_feature (279)..(298): n is a, c, g, or t
tgggtgaccgagtcccctatgtgatcattngngcnnctaagggtgtggccgcctacatgaagtcggaggaccccctgtttgtnnnnnnnnnnnnnnnncccatcgacactcagtnnnnnnnnnnnnnnnnnnnnnnnnnnnngctcttgcgcatctttgagcccatcctgggtgagggccgtgcagagtctgtgctgctgcgcggtgaccacacacgatgcaagactgtgctcaccagcaaggtgggcggcntcttggncttcancaagcgccgcaacnnnnnnnnnnnnnnnnnnnnccgtaatcgaccatcaaggagccgtgtgtaagttctgtcagccacgggagtcggagctcta

SEQ ID NO: 3498 - DNA, 359 bp, Mus musculus; identical to SEQ ID NO: 3497
  misc_feature (30)..(30): n is a, c, g, or t
  misc_feature (32)..(32): n is a, c, g, or t
  misc_feature (35)..(36): n is a, c, g, or t
  misc_feature (83)..(98): n is a, c, g, or t
  misc_feature (115)..(142): n is a, c, g, or t
  misc_feature (252)..(252): n is a, c, g, or t
  misc_feature (259)..(259): n is a, c, g, or t
  misc_feature (265)..(265): n is a, c, g, or t
  misc_feature (279)..(298): n is a, c, g, or t

SEQ ID NO: 3499 - DNA, 232 bp, Mus musculus
  misc_feature (40)..(40): n is a, c, g, or t
  misc_feature (132)..(132): n is a, c, g, or t
  misc_feature (161)..(161): n is a, c, g, or t
  misc_feature (166)..(166): n is a, c, g, or t
attgcaaattttcctcctggcgtagcttgtcaaatataangactaatttggttggattttcacaaagttgaacataaactctagtgcttaagtgacattactctaaaaattacacacttaaacaattttttnctagattcacagccatattttaattactntaganataaactattttcaaaatcaatatctaactctgaacttattggccagccaccaagtttctagatga

SEQ ID NO: 3500 - DNA, 232 bp, Mus musculus; identical to SEQ ID NO: 3499
  misc_feature (40)..(40): n is a, c, g, or t
  misc_feature (132)..(132): n is a, c, g, or t
  misc_feature (161)..(161): n is a, c, g, or t
  misc_feature (166)..(166): n is a, c, g, or t

SEQ ID NO: 3501 - DNA, 329 bp, Mus musculus
  misc_feature (44)..(44): n is a, c, g, or t
  misc_feature (178)..(178): n is a, c, g, or t
  misc_feature (250)..(250): n is a, c, g, or t
ttcctatcctgttgctgggcacacccttgtacctgctgcgccancaccgccacagaagaaacactcagagaaggccagcaggccagcaggatgaggacacggacaagcttctggcctcccctgatgcatccaccttggagaacagctggagccctgatgaggagaaggctgggagccnaggggatgaagaaactgagtttgtcccttctgagatcttcatgcaccaagcaatccacaccattgagttctncctgggctgcatctccaacacagcctcctacttgcgtctctgggccctgagcctggcccatgcccagctgtctgaggtc

SEQ ID NO: 3502 - DNA, 329 bp, Mus musculus; identical to SEQ ID NO: 3501
  misc_feature (44)..(44): n is a, c, g, or t
  misc_feature (178)..(178): n is a, c, g, or t
  misc_feature (250)..(250): n is a, c, g, or t

SEQ ID NO: 3503 - DNA, 426 bp, Mus musculus
  misc_feature (49)..(49): n is a, c, g, or t
  misc_feature (89)..(111): n is a, c, g, or t
aagctgcttgagtctcgactttgtctcctgctgctgctaggacttgtcntaatgcttgcctcatgcctgggacaaaccccttcccagtnnnnnnnnnnnnnnnnnnnnnnnaataatgccaacctccaatgtaatgttgaaatgcagcgtattaacaggtttagaagaacatgtaagggcttaaatacttttcttcatacaagttttgctaatgctgttggtgtgtgtggaaatccaagtggcttgtgcagtgacaatataagtagaaactgtcataatagttcatctcgggtacgtataactgtctgtaacatcaccagtcggaggagaacaccttatacccaatgcagataccaaccaagaagatcattggagtactacacagttgcctgtaaccccagaactccacaggacagtcccatgtat

SEQ ID NO: 3504 - DNA, 426 bp, Mus musculus; identical to SEQ ID NO: 3503
  misc_feature (49)..(49): n is a, c, g, or t
  misc_feature (89)..(111): n is a, c, g, or t

SEQ ID NO: 3505 - DNA, 500 bp, Mus musculus
  misc_feature (35)..(36): n is a, c, g, or t
  misc_feature (38)..(71): n is a, c, g, or t
  misc_feature (122)..(122): n is a, c, g, or t
  misc_feature (125)..(126): n is a, c, g, or t
  misc_feature (255)..(278): n is a, c, g, or t
tctggcctggtgtgccagagccccggggaccctgnngnnnnnnnnnnnnnnnnnnnnnnnnnnnnnnnnnnacgagtcaaagctgtggccaagcggattggcgaggttcaggtggcctgtgnccnnaaccagacagtggaggagtttgtgggagagctgaattttgggctggtagaggttgtgtatgagtgggctaggggtatgcccttctccgagttggcagggctctcagggacccctgagggcttggtcgtnnnnnnnnnnnnnnnnnnnnnnnngatgtgtcgctcgcttcgaggagcagcacgtttggtgggtgagcctgtgctgggtgccaagatggagacggcagccaccttgttacggcgggacatcgtcttcgcagccagcctctacacccagtaaaggatgtgtggatagaaatgtaacaataagctgggttgtagtagcagcgaaggggcagataaatctctttgagtttgatgccaaccatgttttga

SEQ ID NO: 3506 - DNA, 345 bp, Mus musculus
cactttaagttgtgggttagccttggggtctgtactgcaatgcctaaggttccattatagctcaaggctgagagttcacaaaagaaactaccaacttcgggtctgattcccaaatcatacaagttacatttaaacagtcagacagactggcccatctcattgcttgaagccactctgtgccagggagatcagaggactattactctatgaattttgggatttcctggttgttttatatttaatattagatgaggatttgatataaatgtatttctgatatatttctgaggcgttttggttcctgaattgatgttagcatacaaggtacatcctatttcaccccgg

SEQ ID NO: 3507 - DNA, 345 bp, Mus musculus; identical to SEQ ID NO: 3506

SEQ ID NO: 3508 - DNA, 483 bp, Mus musculus
  misc_feature (195)..(195): n is a, c, g, or t
  misc_feature (343)..(343): n is a, c, g, or t
aacgtgaggggacactcgtccacttaccgttggaaccctttcagggggtaggaagccgcgttccctgaagtccctaaggagggccccttcgtatggggggtggttggaacgagttggcgggggtgttttttttggcggcgtcgaaggagttgtgtgttgctcgccgaggagtgaggcgtgggctgtggttgtggngcacgcacgggtgggtagggagagtagaggagcgcgatagttggggcggtcggcgggcgtgtgcgtcgattggtgagtcgtgaggcatcgagagtgagggagagcgtaggaggacgagtgtggaacgacggcagaggaggtggtatgnaggggatgtgttgcggtgaaggtgaggtaggtgataagcgtgcgatagtgtggagtgggctaaagtgagcggcagagtagtgacgatgagatgatggtagtgggaaagtgctatgtatgtgatgtgcgcgtggtgagatt

SEQ ID NO: 3509 - DNA, 483 bp, Mus musculus; identical to SEQ ID NO: 3508
  misc_feature (195)..(195): n is a, c, g, or t
  misc_feature (343)..(343): n is a, c, g, or t

SEQ ID NO: 3510 - DNA, 158 bp, Mus musculus
  misc_feature (29)..(29): n is a, c, g, or t
acatagtgtatttcctcagtgtgaatagnccctgattttatggagcccatgagccaccagccttcttctgggtctgcttccctttgattttctaacaactccccttgagagaactgaggtgactaccctgtcactgtgtccaagaccagagataagct

SEQ ID NO: 3511 - DNA, 158 bp, Mus musculus; identical to SEQ ID NO: 3510
  misc_feature (29)..(29): n is a, c, g, or t

SEQ ID NO: 3512 - DNA, 262 bp, Mus musculus
  misc_feature (48)..(48): n is a, c, g, or t
  misc_feature (51)..(51): n is a, c, g, or t
  misc_feature (54)..(56): n is a, c, g, or t
  misc_feature (210)..(210): n is a, c, g, or t
ggtgacggtaccagcctgaagccccacccaaaaggcgcctaccaactnaancannntgcgtgactgagtcctgagagggagagctgtctcaaagcatgtcccttgaactgtggcctcgatggactgcacaagccagtcgtgggcatcactagccggtgaaggaattctctaatcacctgaggagatcataaatcccactgtctctagatntaaatttcactgattaaatgattaattgaatcctaaatctctagatctgagt

SEQ ID NO: 3513 - DNA, 262 bp, Mus musculus; identical to SEQ ID NO: 3512
  misc_feature (48)..(48): n is a, c, g, or t
  misc_feature (51)..(51): n is a, c, g, or t
  misc_feature (54)..(56): n is a, c, g, or t
  misc_feature (210)..(210): n is a, c, g, or t

SEQ ID NO: 3514 - DNA, 306 bp, Mus musculus
  misc_feature (63)..(102): n is a, c, g, or t
  misc_feature (231)..(245): n is a, c, g, or t
gtatatcatccaaaaggtgctaggatagatgtttcaatcaatgagtgttatgatggctcctannnnnnnnnnnnnnnnnnnnnnnnnnnnnnnnnnnnnnnngcttttagtcgaaatggaccggtaaagagaacacctatcacacatattcttgtttgcaggccaaaaagaacaaaagcaagcatgtcggagtttcttgaatctgaagatggagaagtggagcagcagagnnnnnnnnnnnnnnnccacaatcgtctctatttccacagtgatacctgcttacctcttcggccacaagaaatggaa

SEQ ID NO: 3515 - DNA, 306 bp, Mus musculus; identical to SEQ ID NO: 3514
  misc_feature (63)..(102): n is a, c, g, or t
  misc_feature (231)..(245): n is a, c, g, or t

SEQ ID NO: 3516 - DNA, 238 bp, Mus musculus
gcgtcatactgtattctacctctcgactggaggtggccagcagccagcagccagcagcagccatccctgaggagaaaggaacaaagctagaacagggcgtccgtaggggatgattccctctgggatgatagggcctgctacaggcaggactggtcgggaacagcaggctctggagtgaatggtgtggttcctgagtgtcttctctgggtacctaggcaccacctggagtgtctgaaga

SEQ ID NO: 3517 - DNA, 238 bp, Mus musculus; identical to SEQ ID NO: 3516

SEQ ID NO: 3518 - DNA, 263 bp, Mus musculus
  misc_feature (39)..(39): n is a, c, g, or t
  misc_feature (65)..(65): n is a, c, g, or t
aagtacatgtcaggtcatctctgggagtgaatatatatnccaccattaccaagggcatgggggtncccagggatttgtggtccattcagagtgctgtgatgtagcttaggaggctgcaggctgagtgcatttgaaacaagcatttcattcaatcactttaacataaatgcttacacttttccaaacggttgtgtaactgaccattccctacattcttagcttttatacatcagtaagcccgttgtatcctgagattccccatt

SEQ ID NO: 3519 - DNA, 263 bp, Mus musculus; identical to SEQ ID NO: 3518
  misc_feature (39)..(39): n is a, c, g, or t
  misc_feature (65)..(65): n is a, c, g, or t

SEQ ID NO: 3520 - DNA, 263 bp, Mus musculus
  misc_feature (101)..(101): n is a, c, g, or t
  misc_feature (123)..(140): n is a, c, g, or t
gttgtccctccaaaagagcggctcttccttccatgaagagatgggctaagtatgttgaatctggaatgagaaatgagagccccctgttctctgccttgggntcagcattctggggagtcaggnnnnnnnnnnnnnnnnnnacaagtgcagatggcactttaaacagtagttgctgtctgtgtcgggcagtggtgcagttcttgaagagtactgcagccagcccagggcccagtgggagggccgtccagggactctggccttct

SEQ ID NO: 3521 - DNA, 263 bp, Mus musculus; identical to SEQ ID NO: 3520
  misc_feature (101)..(101): n is a, c, g, or t
  misc_feature (123)..(140): n is a, c, g, or t

SEQ ID NO: 3522 - DNA, 538 bp, Mus musculus
  misc_feature (482)..(513): n is a, c, g, or t
ttcccacgctgagatgttgttgcctacatacatggtgccatctgatacacgtggtgccatctgacacactggctgccatctgacacactcttttaccctttgtgttttctatgagttagcatctgatgcagacttggggtgagactctagtctgattgttttggagtctggaggaggccatgaccttttctggagttacagtgtatctccttgtttttcctttcatgatgttacaacaagcatcgatgctaattggcccatctgctaatttactggggatggctacattgtgacagtctatttctaggattctttatttatagcatattgttggctctgctcaatgttagctgcagtagaagttcaaagctaatggtggtaaaactgttggcatcttaaagtgagtctagcctgcagggtgctaccgttgtgtccagtgctgcaggattctgaaacaaagcactaatttcacttaatagtgnnnnnnnnnnnnnnnnnnnnnnnnnnnnnnnnaaagtcttgacacctgagtaacatc

SEQ ID NO: 3523 - DNA, 538 bp, Mus musculus; identical to SEQ ID NO: 3522
  misc_feature (482)..(513): n is a, c, g, or t

SEQ ID NO: 3524 - DNA, 564 bp, Mus musculus
  misc_feature (48)..(48): n is a, c, g, or t
  misc_feature (67)..(67): n is a, c, g, or t
  misc_feature (82)..(82): n is a, c, g, or t
  misc_feature (90)..(90): n is a, c, g, or t
  misc_feature (116)..(116): n is a, c, g, or t
  misc_feature (123)..(123): n is a, c, g, or t
  misc_feature (128)..(128): n is a, c, g, or t
  misc_feature (161)..(161): n is a, c, g, or t
  misc_feature (228)..(228): n is a, c, g, or t
  misc_feature (235)..(236): n is a, c, g, or t
  misc_feature (239)..(239): n is a, c, g, or t
  misc_feature (314)..(314): n is a, c, g, or t
  misc_feature (318)..(318): n is a, c, g, or t
  misc_feature (322)..(322): n is a, c, g, or t
  misc_feature (374)..(374): n is a, c, g, or t
  misc_feature (415)..(415): n is a, c, g, or t
  misc_feature (425)..(425): n is a, c, g, or t
  misc_feature (443)..(444): n is a, c, g, or t
  misc_feature (447)..(448): n is a, c, g, or t
  misc_feature (451)..(526): n is a, c, g, or t
tgctccagtcactgaaagggctaaattgatttccttaccaactagtanaaactggacctttggaccncaagatatagatganctgatctntatgttaagtgacagccctggggtcnatgtgcnggccntcacgagtcagacagatgtttgcttccagagcntgtcggaagtcagtgatgattggaacggcgctcaatgcgagcgagatgaagaagctcatcacccacnatgggtnngantggaccacccctggaactgcccccacggcaggccaaccatgaggcacgttgccaatctggatgtcatctctcagnactnacanaccccttgtagcatagagtttattacagattgttcggtttgcaaagagaagnttttaagtaatctgattatcgttgtacaaaaattagcatgntgctttaatntactggatccatttaaanncanngtnnnnnnnnnnnnnnnnnnnnnnnnnnnnnnnnnnnnnnnnnnnnnnnnnnnnnnnnnnnnnnnnnnnnnnnnnnnnactttgagaccactccgagccacattcatgagactcaa

SEQ ID NO: 3525 - DNA, 564 bp, Mus musculus; identical to SEQ ID NO: 3524
  misc_feature (48)..(48): n is a, c, g, or t
  misc_feature (67)..(67): n is a, c, g, or t
  misc_feature (82)..(82): n is a, c, g, or t
  misc_feature (90)..(90): n is a, c, g, or t
  misc_feature (116)..(116): n is a, c, g, or t
  misc_feature (123)..(123): n is a, c, g, or t
  misc_feature (128)..(128): n is a, c, g, or t
  misc_feature (161)..(161): n is a, c, g, or t
  misc_feature (228)..(228): n is a, c, g, or t
  misc_feature (235)..(236): n is a, c, g, or t
  misc_feature (239)..(239): n is a, c, g, or t
  misc_feature (314)..(314): n is a, c, g, or t
  misc_feature (318)..(318): n is a, c, g, or t
  misc_feature (322)..(322): n is a, c, g, or t
  misc_feature (374)..(374): n is a, c, g, or t
  misc_feature (415)..(415): n is a, c, g, or t
  misc_feature (425)..(425): n is a, c, g, or t
  misc_feature (443)..(444): n is a, c, g, or t
  misc_feature (447)..(448): n is a, c, g, or t
  misc_feature (451)..(526): n is a, c, g, or t

SEQ ID NO: 3526 - DNA, 564 bp, Mus musculus; identical to SEQ ID NO: 3524
  misc_feature (48)..(48): n is a, c, g, or t
  misc_feature (67)..(67): n is a, c, g, or t
  misc_feature (82)..(82): n is a, c, g, or t
  misc_feature (90)..(90): n is a, c, g, or t
  misc_feature (116)..(116): n is a, c, g, or t
  misc_feature (123)..(123): n is a, c, g, or t
  misc_feature (128)..(128): n is a, c, g, or t
  misc_feature (161)..(161): n is a, c, g, or t
  misc_feature (228)..(228): n is a, c, g, or t
  misc_feature (235)..(236): n is a, c, g, or t
  misc_feature (239)..(239): n is a, c, g, or t
  misc_feature (314)..(314): n is a, c, g, or t
  misc_feature (318)..(318): n is a, c, g, or t
  misc_feature (322)..(322): n is a, c, g, or t
  misc_feature (374)..(374): n is a, c, g, or t
  misc_feature (415)..(415): n is a, c, g, or t
  misc_feature (425)..(425): n is a, c, g, or t
  misc_feature (443)..(444): n is a, c, g, or t
  misc_feature (447)..(448): n is a, c, g, or t
  misc_feature (451)..(526): n is a, c, g, or t

SEQ ID NO: 3527 - DNA, 564 bp, Mus musculus; identical to SEQ ID NO: 3524
  misc_feature (48)..(48): n is a, c, g, or t
  misc_feature (67)..(67): n is a, c, g, or t
  misc_feature (82)..(82): n is a, c, g, or t
  misc_feature (90)..(90): n is a, c, g, or t
  misc_feature (116)..(116): n is a, c, g, or t
  misc_feature (123)..(123): n is a, c, g, or t
  misc_feature (128)..(128): n is a, c, g, or t
  misc_feature (161)..(161): n is a, c, g, or t
  misc_feature (228)..(228): n is a, c, g, or t
  misc_feature (235)..(236): n is a, c, g, or t
  misc_feature (239)..(239): n is a, c, g, or t
  misc_feature (314)..(314): n is a, c, g, or t
  misc_feature (318)..(318): n is a, c, g, or t
  misc_feature (322)..(322): n is a, c, g, or t
  misc_feature (374)..(374): n is a, c, g, or t
  misc_feature (415)..(415): n is a, c, g, or t
  misc_feature (425)..(425): n is a, c, g, or t
  misc_feature (443)..(444): n is a, c, g, or t
  misc_feature (447)..(448): n is a, c, g, or t
  misc_feature (451)..(526): n is a, c, g, or t

SEQ ID NO: 3528 - DNA, 457 bp, Mus musculus
  misc_feature (265)..(265): n is a, c, g, or t
  misc_feature (284)..(284): n is a, c, g, or t
  misc_feature (419)..(419): n is a, c, g, or t
cttgggacttcatgttagagtgactggtgtgaatttgagcaaagcaccatcttcgggataaacggcagcacctccctaatccaccatggtgccctacaagtgccaagtgaagagaagcagtagatacctccgtgagtggctcaactccttgcttccttaggactatacaactcatgcccagggctgggaagatccattcagagaacctccctaggtcagcgtgctgaactcgagccacatgtccacctggcctgcaagctgtaancagtccaaataaccagctntgccaagtgcttaggactgcttagctcacttgttagctgagatggacaccatggccactgtgtaaatccattctgtgctaagaaccaccaatgtagccttcccctcccagcctgaggtgctaaatagaatgcctnatacactcaccctgcttaatgttttcactgcttggagg

SEQ ID NO: 3529 - DNA, 338 bp, Mus musculus
  misc_feature (37)..(40): n is a, c, g, or t
  misc_feature (42)..(59): n is a, c, g, or t
  misc_feature (83)..(97): n is a, c, g, or t
  misc_feature (189)..(189): n is a, c, g, or t
  misc_feature (229)..(229): n is a, c, g, or t
cagttctttcatgttgggtgttcaaaagacagtgctnnnnannnnnnnnnnnnnnnnnngttggtttcttggctttgtgcatnnnnnnnnnnnnnnntctaatgatacagtttttcatatgtacataaatttttgtatgtaggtgtgtcggggagggcagaacaacttgcaagtttgatctcaatgtgngggtcttaaactacctggtcttaaagctttctcttcttcntagggtgacacgagtgaaccctaccctaaaatggtttaaagataacatgaagggtccttaaaataaattgaagaaatcctcaaatcttctggtgacctggatggacagc

SEQ ID NO: 3530 - DNA, 338 bp, Mus musculus; identical to SEQ ID NO: 3529
  misc_feature (37)..(40): n is a, c, g, or t
  misc_feature (42)..(59): n is a, c, g, or t
  misc_feature (83)..(97): n is a, c, g, or t
  misc_feature (189)..(189): n is a, c, g, or t
  misc_feature (229)..(229): n is a, c, g, or t

SEQ ID NO: 3531 - DNA, 52 bp, Mus musculus
ttgaagaaatcctcaaatcttctggtgacctggatggacagcaaaggaatca

SEQ ID NO: 3532 - DNA, 52 bp, Mus musculus; identical to SEQ ID NO: 3531

SEQ ID NO: 3533 - DNA, 395 bp, Mus musculus
  misc_feature (26)..(41): n is a, c, g, or t
  misc_feature (280)..(301): n is a, c, g, or t
  misc_feature (338)..(338): n is a, c, g, or t
  misc_feature (369)..(369): n is a, c, g, or t
acgggaagactgtgctggcttccgannnnnnnnnnnnnnnncggggctacaactttgaggacctgacagatagaaacatagtacaggaagatcatcctattatgtcatttactatttccaaaaatggccgattagctttgttaaatgtagcaactcagggagttcatttatgggacttgcaagacagagttttagtaaggaaatatcaaggtgttacccaagggttttatacaatccactcgtgttttggaggccataatgaagacttcattgctagtgnnnnnnnnnnnnnnnnnnnnnncatctggcacaaacgtagtgaactgccaattgcgganctcacagggcacacgcgcacagtaaattgtnttagctggaacccacagattccatcc

SEQ ID NO: 3534 - DNA, 395 bp, Mus musculus; identical to SEQ ID NO: 3533
  misc_feature (26)..(41): n is a, c, g, or t
  misc_feature (280)..(301): n is a, c, g, or t
  misc_feature (338)..(338): n is a, c, g, or t
  misc_feature (369)..(369): n is a, c, g, or t

SEQ ID NO: 3535 - DNA, 50 bp, Mus musculus
cagctgactgacttgaagtcaccttgctgtatcacgttcacttttgaaaa

SEQ ID NO: 3536 - DNA, 50 bp, Mus musculus; identical to SEQ ID NO: 3535

SEQ ID NO: 3537 - DNA, 355 bp, Mus musculus
  misc_feature (41)..(74): n is a, c, g, or t
  misc_feature (260)..(260): n is a, c, g, or t
  misc_feature (262)..(262): n is a, c, g, or t
  misc_feature (268)..(268): n is a, c, g, or t
  misc_feature (308)..(308): n is a, c, g, or t
  misc_feature (317)..(317): n is a, c, g, or t
  misc_feature (322)..(322): n is a, c, g, or t
gtacccttctgcatggaaaatcataaccaacatggctgcannnnnnnnnnnnnnnnnnnnnnnnnnnnnnnnnnagagggctgctttatcatattgtacttgggtgtaggactctagtgttcttgggtgtattgcatgggctgcattatctacagcattgtacaataacaactagaaaaggcggtatacttcactgatgcttgtctggtaatatcacttctgtgttaaaatggaaggttttttgtgatgtatgaaacttntntttttnatatataaatgagtatagttagattagtgttgtggtaatncctgttttnatctntaaatagttaagtatgtacacaacaaggcacta

SEQ ID NO: 3538 - DNA, 355 bp, Mus musculus; identical to SEQ ID NO: 3537
  misc_feature (41)..(74): n is a, c, g, or t
  misc_feature (260)..(260): n is a, c, g, or t
  misc_feature (262)..(262): n is a, c, g, or t
  misc_feature (268)..(268): n is a, c, g, or t
  misc_feature (308)..(308): n is a, c, g, or t
  misc_feature (317)..(317): n is a, c, g, or t
  misc_feature (322)..(322): n is a, c, g, or t

SEQ ID NO: 3539 - DNA, 335 bp, Mus musculus
  misc_feature (62)..(62): n is a, c, g, or t
  misc_feature (90)..(90): n is a, c, g, or t
  misc_feature (98)..(98): n is a, c, g, or t
  misc_feature (101)..(102): n is a, c, g, or t
  misc_feature (104)..(104): n is a, c, g, or t
  misc_feature (108)..(108): n is a, c, g, or t
  misc_feature (110)..(110): n is a, c, g, or t
  misc_feature (114)..(114): n is a, c, g, or t
  misc_feature (116)..(116): n is a, c, g, or t
  misc_feature (119)..(119): n is a, c, g, or t
  misc_feature (121)..(122): n is a, c, g, or t
  misc_feature (125)..(125): n is a, c, g, or t
  misc_feature (141)..(141): n is a, c, g, or t
  misc_feature (159)..(159): n is a, c, g, or t
  misc_feature (162)..(162): n is a, c, g, or t
  misc_feature (178)..(178): n is a, c, g, or t
  misc_feature (180)..(180): n is a, c, g, or t
  misc_feature (185)..(185): n is a, c, g, or t
  misc_feature (187)..(207): n is a, c, g, or t
  misc_feature (214)..(215): n is a, c, g, or t
  misc_feature (221)..(225): n is a, c, g, or t
  misc_feature (231)..(232): n is a, c, g, or t
  misc_feature (234)..(234): n is a, c, g, or t
  misc_feature (244)..(244): n is a, c, g, or t
  misc_feature (247)..(247): n is a, c, g, or t
  misc_feature (254)..(254): n is a, c, g, or t
  misc_feature (273)..(274): n is a, c, g, or t
  misc_feature (279)..(279): n is a, c, g, or t
  misc_feature (281)..(281): n is a, c, g, or t
  misc_feature (306)..(306): n is a, c, g, or t
cagccgccgggatggacgtgtttctcatgatccggcgccacaagaccaccatctttacggangccaaggagtcgagcaccgtgttcgaantgaagcgnatnntngagngnatcntnaancnnccnccagaggagcagcggntttacaaggatgaccagntcnttgatgatggcaaaantntgggngnnnnnnnnnnnnnnnnnnnnncagcacnngccacnnnnnccccanncncacagtgggnctnggccttnccgagcagatgacaccttnngaagntntccgcatcgagcccttttccagccntccagagcttccagatgtgatgaagccac

SEQ ID NO: 3540 - DNA, 335 bp, Mus musculus; identical to SEQ ID NO: 3539
  misc_feature (62)..(62): n is a, c, g, or t
  misc_feature (90)..(90): n is a, c, g, or t
  misc_feature (98)..(98): n is a, c, g, or t
  misc_feature (101)..(102): n is a, c, g, or t
  misc_feature (104)..(104): n is a, c, g, or t
  misc_feature (108)..(108): n is a, c, g, or t
  misc_feature (110)..(110): n is a, c, g, or t
  misc_feature (114)..(114): n is a, c, g, or t
  misc_feature (116)..(116): n is a, c, g, or t
  misc_feature (119)..(119): n is a, c, g, or t
  misc_feature (121)..(122): n is a, c, g, or t
  misc_feature (125)..(125): n is a, c, g, or t
  misc_feature (141)..(141): n is a, c, g, or t
  misc_feature (159)..(159): n is a, c, g, or t
  misc_feature (162)..(162): n is a, c, g, or t
  misc_feature (178)..(178): n is a, c, g, or t
  misc_feature (180)..(180): n is a, c, g, or t
  misc_feature (185)..(185): n is a, c, g, or t
  misc_feature (187)..(207): n is a, c, g, or t
  misc_feature (214)..(215): n is a, c, g, or t
  misc_feature (221)..(225): n is a, c, g, or t
  misc_feature (231)..(232): n is a, c, g, or t
  misc_feature (234)..(234): n is a, c, g, or t
  misc_feature (244)..(244): n is a, c, g, or t
  misc_feature (247)..(247): n is a, c, g, or t
  misc_feature (254)..(254): n is a, c, g, or t
  misc_feature (273)..(274): n is a, c, g, or t
  misc_feature (279)..(279): n is a, c, g, or t
  misc_feature (281)..(281): n is a, c, g, or t
  misc_feature (306)..(306): n is a, c, g, or t

SEQ ID NO: 3541 - DNA, 342 bp, Mus musculus
  misc_feature (55)..(70): n is a, c, g, or t
  misc_feature (111)..(111): n is a, c, g, or t
  misc_feature (117)..(117): n is a, c, g, or t
gttagtacctgttcacaattaactgtcatgttttctcatgctctaatgtaaatgnnnnnnnnnnnnnnnnctccaagggtgaacaatagctacagtatggttccccataangggaanaagagaaactcacttcccctgttgtccatgagtgtgaacactggggcctttgtacgcaaatgttgtactgtgtgtgggagagctatacagtaagctcacataagactggaacagataggatgtgtgtagctaaaatgcatggcagacgtgtttataaagagcatgtatgtgtccaatatactagttatattttaagaccactggagaattccaagtctagaataa

SEQ ID NO: 3542 - DNA, 342 bp, Mus musculus; identical to SEQ ID NO: 3541
  misc_feature (55)..(70): n is a, c, g, or t
  misc_feature (111)..(111): n is a, c, g, or t
  misc_feature (117)..(117): n is a, c, g, or t

SEQ ID NO: 3543 - DNA, 281 bp, Mus musculus
  misc_feature (59)..(59): n is a, c, g, or t
  misc_feature (67)..(67): n is a, c, g, or t
  misc_feature (85)..(85): n is a, c, g, or t
  misc_feature (87)..(89): n is a, c, g, or t
  misc_feature (235)..(235): n is a, c, g, or t
gcttctgtagacacaatcttctgtctccatacagaggcactgacttcaataaagtctanttatactnaaaaaaaaaaaaaaaaanannnggccgcagctatccgttagtgagggtagttagctggactgccgcggttcacgcgtactggaaccttgcgtacgactactgctgagaatcccttgcactggaatcggaggcgcgtgcctctaagtgccgtgaagggagcgccttggngtgtagagcgggttgctgcgtatttgcctcggcttcgtcttttcag

SEQ ID NO: 3544 - DNA, 281 bp, Mus musculus; identical to SEQ ID NO: 3543
  misc_feature (59)..(59): n is a, c, g, or t
  misc_feature (67)..(67): n is a, c, g, or t
  misc_feature (85)..(85): n is a, c, g, or t
  misc_feature (87)..(89): n is a, c, g, or t
  misc_feature (235)..(235): n is a, c, g, or t

SEQ ID NO: 3545 - DNA, 162 bp, Mus musculus
  misc_feature (27)..(28): n is a, c, g, or t
gtgcacttctaagaatttggccggggnnaggaggaagctgaacttgttctctgcacacctgactgggatactccagctgactcactccttcaacacagaacccacctgtgcaccaggaaaccagctctgaatagacggccagtggcttttctcccaaaacct

SEQ ID NO: 3546 - DNA, 162 bp, Mus musculus; identical to SEQ ID NO: 3545
  misc_feature (27)..(28): n is a, c, g, or t

SEQ ID NO: 3547 - DNA, 507 bp, Mus musculus
  misc_feature (235)..(249): n is a, c, g, or t
  misc_feature (357)..(360): n is a, c, g, or t
  misc_feature (373)..(373): n is a, c, g, or t
  misc_feature (377)..(377): n is a, c, g, or t
  misc_feature (387)..(387): n is a, c, g, or t
  misc_feature (445)..(445): n is a, c, g, or t
agcaccaggatgcaggacaccagtgcctcctttgggtatcagctggacctgcccaaggccaacttcctttttaaaggctctgtgaacagtaactggatcgtgggcgccacgctggagaagaagcttccgcccttgcccctgacactgtccctctgcgccttcctgaaccaccgcaagaataagttcctgtgtggcttcggcctcaccatcggctgagccctcctgtccttcctcnnnnnnnnnnnnnnnggccggctgccctcccctcctctccctctctcttggggttggggcagtgggaaggaggggacctcccatgcccaaggatccccagcgccaggggacagtgcccagggnnnntggggtcccgganggantcctgggatntgaagggcattcgattgtgagcgcccaggcagaggcgcagaggcggctgtacacaggntcagaaaggaaagacttgatgtcctcctgagggcagcagaggagcgccgagccgcctgtcac

SEQ ID NO: 3548 - DNA, 507 bp, Mus musculus; identical to SEQ ID NO: 3547
  misc_feature (235)..(249): n is a, c, g, or t
  misc_feature (357)..(360): n is a, c, g, or t
  misc_feature (373)..(373): n is a, c, g, or t
  misc_feature (377)..(377): n is a, c, g, or t
  misc_feature (387)..(387): n is a, c, g, or t
  misc_feature (445)..(445): n is a, c, g, or t

SEQ ID NO: 3549 - DNA, 424 bp, Mus musculus
  misc_feature (28)..(28): n is a, c, g, or t
  misc_feature (176)..(176): n is a, c, g, or t
  misc_feature (185)..(185): n is a, c, g, or t
  misc_feature (242)..(242): n is a, c, g, or t
  misc_feature (268)..(301): n is a, c, g, or t
ttctctctgcaatggcctcattgctgcncaggtcctcttctactggaacgcaaaggctccccacaaacagaaaaaggagcaatagagctgagctcgcttctagaacaattccatttccactcatcctcagagtcctccccacatgacttgatctgcgggtgcagtgtaagcacccnccattcctntaactgcagcctcctgagccagggttgtgggagcagtaaagcttgtgtaggccctgncttcactcactcacttccccagatcnnnnnnnnnnnnnnnnnnnnnnnnnnnnnnnnnngctctggccctgtccacttaccttccttttggaccaaggacagagcctagaaaactgtggttggaagctagtggctgcttccctgtgctgcccgggtgggatggtctattggagcccagttct

SEQ ID NO: 3550 - DNA, 293 bp, Mus musculus
  misc_feature (31)..(31): n is a, c, g, or t
  misc_feature (64)..(65): n is a, c, g, or t
  misc_feature (266)..(267): n is a, c, g, or t
agttctacaatgacccgggaagctgcgtacntgtgcactgtgtggcgggcctgggaagggcccnnagtgctcgtggctctcgccctcatcgagagcgggatgaagtacgaggacgccatccagttcatccgacagaagcgccgtggggccatcaacagcaagcagctcacctacctggagaagtaccggcctaagcagagactgaggttcaaagacccacacacgcacaagaccagatgctgcgtcatgtagctcaggccctggcnntgtacctcattacatctgtgtctaag

SEQ ID NO: 3551 - DNA, 293 bp, Mus musculus; identical to SEQ ID NO: 3550
  misc_feature (31)..(31): n is a, c, g, or t
  misc_feature (64)..(65): n is a, c, g, or t
  misc_feature (266)..(267): n is a, c, g, or t

SEQ ID NO: 3552 - DNA, 328 bp, Mus musculus
  misc_feature (144)..(202): n is a, c, g, or t
gagaaagcttctgacccctcaagctctcttcgggctgcccaagcggacagtaaagctgaagaaaagacagctactaatgttcctgccaatgtgagcaaaggcacaacacctctggctccaccaccaaaacctgttagaagaagnnnnnnnnnnnnnnnnnnnnnnnnnnnnnnnnnnnnnnnnnnnnnnnnnnnnnnnnnnntcctagctgctgttctaacatcacagccttctattcccagatctgtggggaaagataaaaaggctatccaggcatccattagacgaaataaggaaaccaacacggttctggccaggctgaacagtg

SEQ ID NO: 3553 - DNA, 328 bp, Mus musculus; identical to SEQ ID NO: 3552
  misc_feature (144)..(202): n is a, c, g, or t

SEQ ID NO: 3554 - DNA, 178 bp, Mus musculus
  misc_feature (76)..(124): n is a, c, g, or t
aatacttgctccaatcaattatctggaatgaggagataccttcagaacaaatgtgcaagagcaccccccatcgggnnnnnnnnnnnnnnnnnnnnnnnnnnnnnnnnnnnnnnnnnnnnnnnnngtgccaggtgtgaggccttaggactttggctttatgagatcagcttagggttag

SEQ ID NO: 3555 - DNA, 154 bp, Mus musculus
ttatgtcccctactgcaggtcttaactaacagtggagggctgctgtcctgctgaccttctcattgctttggcctctaatgtatgttcctgcttcagtttggaaagaaaaaaaaaaccatactaatttgcttccatttcaatgtagtgcttgaat

SEQ ID NO: 3556 - DNA, 587 bp, Mus musculus
  misc_feature (43)..(43): n is a, c, g, or t
  misc_feature (68)..(94): n is a, c, g, or t
gcaacccgaggatggcaattatgagaacgagtctgtgcggcanctggagaatgagctgcagctggagnnnnnnnnnnnnnnnnnnnnnnnnnnngaggcctaccaggtcagcttgcaaggttgaatgcaatgcccttttctcactctcctctcaagcaagctatagtcagacagatgaggaaagatacatgccatccggtggtggagagagctgcacccacccgacagagaggaggaagactgcggcctggaagcagcctcccgctcgctcgctgggaaagaggagccaccacacccagcagctccaacaaccccctcccctaaagaagtgttctgacgcctgtagtgcagctagctttctgttctaaattctgtagttcctaggtgtgtgttttagaaggggggtgggggctcgagacttctgttcctagataatttatcaactccatcttctgtaacatggctcatccctggttcaaaacaaacacccacaggctgagagctgctgctgttacacacaggacacgagtatacgagcattaacttgcacacatatgaccgtcagttacacgcaatatatactgttg

SEQ ID NO: 3557 - DNA, 335 bp, Mus musculus
  misc_feature (26)..(41): n is a, c, g, or t
  misc_feature (239)..(253): n is a, c, g, or t
  misc_feature (261)..(278): n is a, c, g, or t
agagacgttgcctgtcatccgatctnnnnnnnnnnnnnnnnaggaccctgaacagacaacgttcatctgtgtgtgcatcgccgaattcttgtccttgtacgagacggagcggctgatccaggagctggctaagtgcaagatcgacacccacaacatcatcgtcaaccagcttgtcttccctgaccctgagaaaccctgcaagatgtgtgaggcccgacacaagatccaggccaagtacnnnnnnnnnnnnnnngacctatnnnnnnnnnnnnnnnnnntaaagctgccactgttacctcacgaggttcggggagccgacaaagtcaacaccttct

SEQ ID NO: 3558 - DNA, 335 bp, Mus musculus; identical to SEQ ID NO: 3557
  misc_feature (26)..(41): n is a, c, g, or t
  misc_feature (239)..(253): n is a, c, g, or t
  misc_feature (261)..(278): n is a, c, g, or t

SEQ ID NO: 3559 - DNA, 424 bp, Mus musculus
  misc_feature (29)..(44): n is a, c, g, or t
  misc_feature (299)..(313): n is a, c, g, or t
  misc_feature (350)..(350): n is a, c, g, or t
  misc_feature (365)..(382): n is a, c, g, or t
  misc_feature (399)..(399): n is a, c, g, or t
tcctggagcgtcacggcaagctggcggannnnnnnnnnnnnnnngaccagctcctggacatgagttcggccttcagcaagacaaccaagactttagcccagcagaagcgctgggaaaatatccggtgccgggtctacttggggctagcagtggctgttggcctgctcatcatcctgattgtgttgctggtcgtctttcttccgagtggtggggacagtagtaaaccataggcctaggatgcaggtgatgccttagggactggggactgacccagcccggcctgaagggaaggctgaatnnnnnnnnnnnnnnnttttggtctccagagaatcctggtgtttgcttccatntaggacacccaaatnnnnnnnnnnnnnnnnnnaggattatgtgcacctntgcatctcccatcatgccatggact

SEQ ID NO: 3560 - DNA, 424 bp, Mus musculus; identical to SEQ ID NO: 3559
  misc_feature (29)..(44): n is a, c, g, or t
  misc_feature (299)..(313): n is a, c, g, or t
  misc_feature (350)..(350): n is a, c, g, or t
  misc_feature (365)..(382): n is a, c, g, or t
  misc_feature (399)..(399): n is a, c, g, or t

SEQ ID NO: 3561 - DNA, 349 bp, Mus musculus
  misc_feature (317)..(317): n is a, c, g, or t
ccaacgagcaatagcagagaatgcctgaagctaatccgataaacttgggaccaagagacagtagaaaacggatgaatttgatggtcttttaaactgatcctggacatcactgatactgcagtgttaaagctacaaaagctagaaaactgaagatggtatctgcttccagaggtgtgggaagactaggacgtgattattaacgaccaacttctgttattgtgtgttaagtttttcatctgtgcatcaaatcacaaagaataaatagagcttttcctttatcaatcccctgggcacagcaggtcctgcagagcttgctntagaatgttgcatcaagagctccgaatatcaa

SEQ ID NO: 3562 - DNA, 349 bp, Mus musculus; identical to SEQ ID NO: 3561
  misc_feature (317)..(317): n is a, c, g, or t

SEQ ID NO: 3563 - DNA, 170 bp, Mus musculus
  misc_feature (93)..(93): n is a, c, g, or t
  misc_feature (99)..(113): n is a, c, g, or t
  misc_feature (118)..(118): n is a, c, g, or t
aaatctcaacatggagaatgaccatcagaaaaaggaggagaaggaagaaaagccacaagataccatcagaagggagccagctgtggccctganctccgnnnnnnnnnnnnnnngtgcncctagaggaggtcgcaggcggttccgggttcggcagcccatcgctcactata

SEQ ID NO: 3564 - DNA, 170 bp, Mus musculus; identical to SEQ ID NO: 3563
  misc_feature (93)..(93): n is a, c, g, or t
  misc_feature (99)..(113): n is a, c, g, or t
  misc_feature (118)..(118): n is a, c, g, or t

SEQ ID NO: 3565 - DNA, 442 bp, Mus musculus
  misc_feature (28)..(28): n is a, c, g, or t
  misc_feature (207)..(207): n is a, c, g, or t
  misc_feature (215)..(217): n is a, c, g, or t
  misc_feature (249)..(267): n is a, c, g, or t
atgccctgaggcaccaaggaaaaaaaangaaaagaaaagaatccccaagtgccttttgaattgtctgaaagtaacagtgtgcttggtagtgttagttgctaagtgtcctaacttatttttgaaatctgttaacatggagaagactctgtgtggtgttgtttttgaaactggggcagtccttttatggaatagtaataaactaatggncattagannnaaaaaaaaaaaaaaaaaaaaaaaaaaaggccnnnnnnnnnnnnnnnnnnncggcgttaaagcggcttggaaacctgtggtcacatatacgtgggaccccccttcccgggggggaaaaggggaggccccgcgtcccctcagggcggtgcgccccccgttcgggggaggttgggtgggggagtgtggagttgaggttaggcttctggccctgactcttggcggcgca

SEQ ID NO: 3566 - DNA, 442 bp, Mus musculus; identical to SEQ ID NO: 3565
  misc_feature (28)..(28): n is a, c, g, or t
  misc_feature (207)..(207): n is a, c, g, or t
  misc_feature (215)..(217): n is a, c, g, or t
  misc_feature (249)..(267): n is a, c, g, or t

SEQ ID NO: 3567 - DNA, 492 bp, Mus musculus
  misc_feature (248)..(262): n is a, c, g, or t
  misc_feature (338)..(338): n is a, c, g, or t
  misc_feature (348)..(348): n is a, c, g, or t
  misc_feature (373)..(373): n is a, c, g, or t
gtatacattcgtttgatcctttaagttgttgccacccataaaaaggcatcttacagtgcagtttttaaattacatgggtagcaattttgagttttaaaaattagtcattgcagaaattaaatacttagaggagataatccattatcttgactttaggaatataatagttgacaatgtttatatataattttacttctctaaggcatacccaaaaatagaaaatgaaaaagagcagtgagtctgttctnnnnnnnnnnnnnnntagagaagttttccaacaaagcagctgttaataacacataaaatatgttttactttgcaaagtaggttgtgttaantcattttcanaaagttacctactatatcgaggctntggataattactatgtgttgattaaagttagttacagaattgtacaagctaagttttccttaaactaagcttaggttaaagggagaggagccacagctcaatgaaaacacggttcctgt

SEQ ID NO: 3568 - DNA, 492 bp, Mus musculus; identical to SEQ ID NO: 3567
  misc_feature (248)..(262): n is a, c, g, or t
  misc_feature (338)..(338): n is a, c, g, or t
  misc_feature (348)..(348): n is a, c, g, or t
  misc_feature (373)..(373): n is a, c, g, or t

SEQ ID NO: 3569 - DNA, 290 bp, Mus musculus
  misc_feature (146)..(146): n is a, c, g, or t
  misc_feature (159)..(159): n is a, c, g, or t
  misc_feature (168)..(168): n is a, c, g, or t
  misc_feature (179)..(179): n is a, c, g, or t
tcagcgcatcacattggcagaagccttgctgcaccccttctttgctggcctgacccctgaggagcggtccttccacagcagccgtaaccccagcagatgacaggtgcaggccagcacacgaagagttggagagctggactgggctnctggccccttttntccagcctntcccactggcntcagagccagagccaccgatgaacagtgcaatgtgaaggaaggcaggagcctgcaagggaagggggaatgtggtgcccggctgccagaaagcacagattggacccaagcta

SEQ ID NO: 3570 - DNA, 290 bp, Mus musculus; identical to SEQ ID NO: 3569
  misc_feature (146)..(146): n is a, c, g, or t
  misc_feature (159)..(159): n is a, c, g, or t
  misc_feature (168)..(168): n is a, c, g, or t
  misc_feature (179)..(179): n is a, c, g, or t

SEQ ID NO: 3571 - DNA, 336 bp, Mus musculus
  misc_feature (34)..(66): n is a, c, g, or t
  misc_feature (69)..(69): n is a, c, g, or t
  misc_feature (76)..(105): n is a, c, g, or t
  misc_feature (199)..(199): n is a, c, g, or t
  misc_feature (215)..(247): n is a, c, g, or t
  misc_feature (251)..(251): n is a, c, g, or t
  misc_feature (261)..(261): n is a, c, g, or t
  misc_feature (264)..(264): n is a, c, g, or t
cttgtcacgccaaatgaagagagaaatgttatgnnnnnnnnnnnnnnnnnnnnnnnnnnnnnnnnnacngcccagnnnnnnnnnnnnnnnnnnnnnnnnnnnnnnccagttatcatggcctcccaaactacccacaaagaagaaaagagtttactagaactagaagttgatttggataacttggaattagaggatattnacacaacagacattannnnnnnnnnnnnnnnnnnnnnnnnnnnnnnnntttnccatttactncantaagagattattatggcattttcaaatcaatcaccatcctgaccagaactttggaaatccttgatttgcata

SEQ ID NO: 3572 - DNA, 336 bp, Mus musculus; identical to SEQ ID NO: 3571
  misc_feature (34)..(66): n is a, c, g, or t
  misc_feature (69)..(69): n is a, c, g, or t
  misc_feature (76)..(105): n is a, c, g, or t
  misc_feature (199)..(199): n is a, c, g, or t
  misc_feature (215)..(247): n is a, c, g, or t
  misc_feature (251)..(251): n is a, c, g, or t
  misc_feature (261)..(261): n is a, c, g, or t
  misc_feature (264)..(264): n is a, c, g, or t

SEQ ID NO: 3573 - DNA, 455 bp, Mus musculus
  misc_feature (48)..(80): n is a, c, g, or t
  misc_feature (83)..(83): n is a, c, g, or t
  misc_feature (90)..(119): n is a, c, g, or t
  misc_feature (213)..(213): n is a, c, g, or t
  misc_feature (229)..(261): n is a, c, g, or t
  misc_feature (265)..(265): n is a, c, g, or t
  misc_feature (275)..(275): n is a, c, g, or t
  misc_feature (278)..(278): n is a, c, g, or t
  misc_feature (360)..(379): n is a, c, g, or t
  misc_feature (381)..(381): n is a, c, g, or t
  misc_feature (419)..(419): n is a, c, g, or t
ccaagcagtaccctcttgtcacgccaaatgaagagagaaatgttatgnnnnnnnnnnnnnnnnnnnnnnnnnnnnnnnnnacngcccagnnnnnnnnnnnnnnnnnnnnnnnnnnnnnnccagttatcatggcctcccaaactacccacaaagaagaaaagagtttactagaactagaagttgatttggataacttggaattagaggatattnacacaacagacattannnnnnnnnnnnnnnnnnnnnnnnnnnnnnnnntttnccatttactncantaagagattattatggcattttcaaatcaatcaccatcctgaccagaactttggaaatccttgatttgcatatgtaaacaannnnnnnnnnnnnnnnnnnntnttcaggagttgatgggcagcgtttaagttactatgttntccttggtaactgaaacagaaacttgctttttttca

SEQ ID NO: 3574 - DNA, 455 bp, Mus musculus; identical to SEQ ID NO: 3573
  misc_feature (48)..(80): n is a, c, g, or t
  misc_feature (83)..(83): n is a, c, g, or t
  misc_feature (90)..(119): n is a, c, g, or t
  misc_feature (213)..(213): n is a, c, g, or t
  misc_feature (229)..(261): n is a, c, g, or t
  misc_feature (265)..(265): n is a, c, g, or t
  misc_feature (275)..(275): n is a, c, g, or t
  misc_feature (278)..(278): n is a, c, g, or t
  misc_feature (360)..(379): n is a, c, g, or t
  misc_feature (381)..(381): n is a, c, g, or t
  misc_feature (419)..(419): n is a, c, g, or t

SEQ ID NO: 3575 - DNA, 77 bp, Mus musculus
ttccccaggggctgtgcttccatgctcctaacctcccaccttcagctcaggacatgtcctaacttaggctaaactgt

SEQ ID NO: 3576 - DNA, 77 bp, Mus musculus; identical to SEQ ID NO: 3575

SEQ ID NO: 3577 - DNA, 592 bp, Mus musculus
  misc_feature (161)..(161): n is a, c, g, or t
  misc_feature (179)..(179): n is a, c, g, or t
  misc_feature (215)..(215): n is a, c, g, or t
  misc_feature (244)..(244): n is a, c, g, or t
  misc_feature (293)..(293): n is a, c, g, or t
  misc_feature (401)..(411): n is a, c, g, or t
  misc_feature (475)..(489): n is a, c, g, or t
  misc_feature (509)..(509): n is a, c, g, or t
  misc_feature (535)..(538): n is a, c, g, or t
  misc_feature (544)..(544): n is a, c, g, or t
  misc_feature (566)..(566): n is a, c, g, or t
caagtctctgcaggacatgaagctacagtcgttgtttgaatcacccgacttcagcaagattactggcaaacccgtgaagctcacccaagtggaacacagggctgctttcgagtggaatgaagagggggcaggaagcagccccagcccaggcctccagcccntccgcctcaccttcccgntagactatcaccttaaccaacctttcctctttgttntgagggacacggacacgggggccctcctnttcataggcagaatcctggaccccagtagtacttaatgtctcagtgctntacagaacccccagagggaagctgattatacattccaggaaggcggccggtagcttcagtgtagcctctgcaataaaagagcttttccttaaaaaaaaaaaaaaaaannnnnnnnnnnaagctgtttcatatggagagaaactggtccttatgaatttacatacttgtaacatgaacgggcnnnnnnnnnnnnnnnccaaagtcaccatttcctgntctcggagtgcaggtggatgaggaannnnaacgtnctgccccaggagggcccccgtncccggagggcaccttcacacacaatt

SEQ ID NO: 3578 - DNA, 592 bp, Mus musculus; identical to SEQ ID NO: 3577
  misc_feature (161)..(161): n is a, c, g, or t
  misc_feature (179)..(179): n is a, c, g, or t
  misc_feature (215)..(215): n is a, c, g, or t
  misc_feature (244)..(244): n is a, c, g, or t
  misc_feature (293)..(293): n is a, c, g, or t
  misc_feature (401)..(411): n is a, c, g, or t
  misc_feature (475)..(489): n is a, c, g, or t
  misc_feature (509)..(509): n is a, c, g, or t
  misc_feature (535)..(538): n is a, c, g, or t
  misc_feature (544)..(544): n is a, c, g, or t
  misc_feature (566)..(566): n is a, c, g, or t

SEQ ID NO: 3579 - DNA, 329 bp, Mus musculus
  misc_feature (222)..(236): n is a, c, g, or t
gatttctgtgcttcgcagaattccagccttcttcagccccaatccagaaatgaattgagttttatgaacttcagtcaaacctttttctggattggaatgcattatagtgaaaaaagaaatgcctggctatgggaggatggcacagttccctcaaaagatttatttccagaattctcagttatcaggccagagcactgcattgtttacagtccaagcaaaagnnnnnnnnnnnnnnnctgtgaaaataaaaaccgttacatctgtaagaaactgcctatttaaatgtttcttaaggcaaagggtatagacaaggaaggtccacggttact

SEQ ID NO: 3580 - DNA, 329 bp, Mus musculus; identical to SEQ ID NO: 3579
  misc_feature (222)..(236): n is a, c, g, or t

SEQ ID NO: 3581 - DNA, 195 bp, Mus musculus
  misc_feature (50)..(64): n is a, c, g, or t
  misc_feature (108)..(108): n is a, c, g, or t
tatgcactgggtgaagcagaggcctgaacagggcctggagtggattggannnnnnnnnnnnnnnaatggtaatactaaatatgacccgaagttccagggcaaggccantataacagcagacacatcctccaacacagcctacctgcagctcagcagcctgacatctgaggacactgccgtctattactgtgctag

SEQ ID NO: 3582 - DNA, 195 bp, Mus musculus; identical to SEQ ID NO: 3581
  misc_feature (50)..(64): n is a, c, g, or t
  misc_feature (108)..(108): n is a, c, g, or t

SEQ ID NO: 3583 - DNA, 396 bp, Mus musculus
  misc_feature (26)..(48): n is a, c, g, or t
  misc_feature (60)..(60): n is a, c, g, or t
tgactgaacattcgttgcactaactnnnnnnnnnnnnnnnnnnnnnnnggggaaaggggncaaggaaggaggaaaagaaaagaaggggagaaaccctaaaaaagagaagaatttgggtgaacacatgcacctgtctaaagttctccactagctgactctactgcatttcaacttctccctgattattcatccgtttttaagcctgaagagcttattacttatttgtgcgaagtgccttatgctacaagaccattaagaatatcatctttacacacagcccaaggaatcaacagagtcatgttctattttcttttttatttctttgcctcttcattttggtttcacgttgaagtctcacctcctgttctaccagtactcagcccagggccggaaggt

SEQ ID NO: 3584 - DNA, 396 bp, Mus musculus; identical to SEQ ID NO: 3583
  misc_feature (26)..(48): n is a, c, g, or t
  misc_feature (60)..(60): n is a, c, g, or t

SEQ ID NO: 3585 - DNA, 344 bp, Mus musculus
  misc_feature (286)..(286): n is a, c, g, or t
catgcacctgtctaaagttctccactagctgactctactgcatttcaacttctccctgattattcatccgtttttaagcctgaagagcttattacttatttgtgcgaagtgccttatgctacaagaccattaagaatatcatctttacacacagcccaaggaatcaacagagtcatgttctattttcttttttatttctttgcctcttcattttggtttcacgttgaagtctcacctcctgttctaccagtactcagcccagggccggaaggtggactagtgatgncagcgccattttccttttctttatatggaggagttgattcacaactgcagtccatcca

SEQ ID NO: 3586 - DNA, 344 bp, Mus musculus; identical to SEQ ID NO: 3585
  misc_feature (286)..(286): n is a, c, g, or t

SEQ ID NO: 3587 - DNA, 432 bp, Mus musculus
tgttgttgagccagccggcaggcccggctcccctgcacccgcagagaaggttgagactccgtccccgcccacggcctcagctctggattaccccagtgagaatctggccttcatcgacgagtcctcagacacgcagagtgagcgtggctgtgccctgcctcgggctcctcggggtcgccgccgacccaacccatccaaaaagccttccagaccccggggtcctgggcgactccgagacaaggccgtgccggtgtaggggcaggatctctggacccggatcccacgccagggctttcgctcttgctgatgctcaggcatgcttggcttatttgaccaaagagccgtccctcttttgttccacgtggttgcaaccctgacaggagtccagtggttgccaaatgccaccgctcttccctggctggttcttcacat

SEQ ID NO: 3588 - DNA, 432 bp, Mus musculus; identical to SEQ ID NO: 3587

SEQ ID NO: 3589 - DNA, 483 bp, Mus musculus
  misc_feature (268)..(269): n is a, c, g, or t
  misc_feature (414)..(414): n is a, c, g, or t
cagatacatgtcatggagtgcatagagtaggagcagcagatgcaaggccacttgcagtactatgtcctgatctgtgtgacttgtgctttcctgttttacctgcatagtccacacttaagggcttgctttagccctttggtcccccatttagggtagacagccccattcagggcttttttttttttctgtgtgcctgatccagtttgcctctggtggcttcttccctcttctcccatagtcctagggagtctagaatggaggccagggnntcttagggagcatcccttctccaagcaggtctgggtacagcttttcttctctccaactggtacctttcttgccggtgaactgcaggctctcctcccagggcatgtggcacttgggtctataacatgtgttacctctggtagacangtggaaagtattctgtccttttgttactgtaattaatggtgtagtgaaagtacttgtacactgatctgt

SEQ ID NO: 3590 - DNA, 483 bp, Mus musculus; identical to SEQ ID NO: 3589
  misc_feature (268)..(269): n is a, c, g, or t
  misc_feature (414)..(414): n is a, c, g, or t

SEQ ID NO: 3591 - DNA, 165 bp, Mus musculus
tttctgggtgtgtcctaaaggtcagaggtcaggtctgcatgcttgagcaggtggaggatttgcccctccccaactgggacccacagtggcctcaggggctctgggccgcagctctgggtctgggtcgagtcaggctgggctgtgtgtctgcctggttggttagtc

SEQ ID NO: 3592 - DNA, 165 bp, Mus musculus; identical to SEQ ID NO: 3591

SEQ ID NO: 3593 - DNA, 514 bp, Mus musculus
  misc_feature (50)..(51): n is a, c, g, or t
  misc_feature (53)..(53): n is a, c, g, or t
  misc_feature (124)..(124): n is a, c, g, or t
  misc_feature (128)..(145): n is a, c, g, or t
  misc_feature (188)..(188): n is a, c, g, or t
  misc_feature (194)..(196): n is a, c, g, or t
  misc_feature (206)..(206): n is a, c, g, or t
  misc_feature (211)..(211): n is a, c, g, or t
  misc_feature (216)..(216): n is a, c, g, or t
  misc_feature (222)..(223): n is a, c, g, or t
  misc_feature (225)..(225): n is a, c, g, or t
  misc_feature (270)..(284): n is a, c, g, or t
  misc_feature (286)..(288): n is a, c, g, or t
  misc_feature (291)..(291): n is a, c, g, or t
  misc_feature (293)..(296): n is a, c, g, or t
  misc_feature (298)..(300): n is a, c, g, or t
  misc_feature (303)..(305): n is a, c, g, or t
  misc_feature (308)..(308): n is a, c, g, or t
  misc_feature (313)..(313): n is a, c, g, or t
  misc_feature (315)..(315): n is a, c, g, or t
  misc_feature (318)..(320): n is a, c, g, or t
  misc_feature (322)..(322): n is a, c, g, or t
  misc_feature (325)..(326): n is a, c, g, or t
  misc_feature (328)..(360): n is a, c, g, or t
  misc_feature (362)..(363): n is a, c, g, or t
  misc_feature (365)..(367): n is a, c, g, or t
  misc_feature (412)..(412): n is a, c, g, or t
  misc_feature (415)..(415): n is a, c, g, or t
  misc_feature (420)..(420): n is a, c, g, or t
  misc_feature (429)..(429): n is a, c, g, or t
  misc_feature (431)..(431): n is a, c, g, or t
  misc_feature (435)..(435): n is a, c, g, or t
  misc_feature (463)..(486): n is a, c, g, or t
aaggcagccacaattgtcagccccacctgtttcagctcaagaactgcctnnangctggtctgaggctgctggaagaatggcagccacctgtttcttctacctgagcctagacctgccccttctncatnnnnnnnnnnnnnnnnnnccattggctagcacacccatgctgacttgtgaagacatggggncaatcnnncatagtaganctgangttcnacattnnantctagttatttaacacaaatagctcctataactttttatttaaannnnnnnnnnnnnnntnnnggngnnnngnnnggnnnggnaggantntgnnnanagnntnnnnnnnnnnnnnnnnnnnnnnnnnnnnnnnnntnnannntccaagccgcaaacatgttcatgcatagggcacctgttccctttntgntcaantccaaggcntntcantcgcccccaagagcactgaagaaagggnnnnnnnnnnnnnnnnnnnnnnnnttgtaggatattcagtcctcccaactgt

SEQ ID NO: 3594 - DNA, 514 bp, Mus musculus; identical to SEQ ID NO: 3593
  misc_feature (50)..(51): n is a, c, g, or t
  misc_feature (53)..(53): n is a, c, g, or t
  misc_feature (124)..(124): n is a, c, g, or t
  misc_feature (128)..(145): n is a, c, g, or t
  misc_feature (188)..(188): n is a, c, g, or t
  misc_feature (194)..(196): n is a, c, g, or t
  misc_feature (206)..(206): n is a, c, g, or t
  misc_feature (211)..(211): n is a, c, g, or t
  misc_feature (216)..(216): n is a, c, g, or t
  misc_feature (222)..(223): n is a, c, g, or t
  misc_feature (225)..(225): n is a, c, g, or t
  misc_feature (270)..(284): n is a, c, g, or t
  misc_feature (286)..(288): n is a, c, g, or t
  misc_feature (291)..(291): n is a, c, g, or t
  misc_feature (293)..(296): n is a, c, g, or t
  misc_feature (298)..(300): n is a, c, g, or t
  misc_feature (303)..(305): n is a, c, g, or t
  misc_feature (308)..(308): n is a, c, g, or t
  misc_feature (313)..(313): n is a, c, g, or t
  misc_feature (315)..(315): n is a, c, g, or t
  misc_feature (318)..(320): n is a, c, g, or t
  misc_feature (322)..(322): n is a, c, g, or t
  misc_feature (325)..(326): n is a, c, g, or t
  misc_feature (328)..(360): n is a, c, g, or t
  misc_feature (362)..(363): n is a, c, g, or t
  misc_feature (365)..(367): n is a, c, g, or t
  misc_feature (412)..(412): n is a, c, g, or t
  misc_feature (415)..(415): n is a, c, g, or t
  misc_feature (420)..(420): n is a, c, g, or t
  misc_feature (429)..(429): n is a, c, g, or t
  misc_feature (431)..(431): n is a, c, g, or t
  misc_feature (435)..(435): n is a, c, g, or t
  misc_feature (463)..(486): n is a, c, g, or t

SEQ ID NO: 3595 - DNA, 386 bp, Mus musculus
  misc_feature (359)..(359): n is a, c, g, or t
tcagcctggatgagcgaatttatgtgaaaatgagaaatgaccgagagcttcgaggcagactacacgcttatgatcaacatttaaatatgatcctgggagatgtagaagaaactgtgacaacgatagagattgatgaggagacatatgaagagatatataaatccacaaaacgaaacatccctatgctcttcgtccggggagatggcgtcgttctagtcgcccctccattgagagttggctgagacaaaagatggatcctgtgtaggaaagtggagactttgcctcttgagatgtacaggacactcccagagagagacgctcacacgaatcctgatagtcagaaatgaccccaggatcantctaccctcgaagaagttcatttgcaa

SEQ ID NO: 3596 - DNA, 386 bp, Mus musculus; identical to SEQ ID NO: 3595
  misc_feature (359)..(359): n is a, c, g, or t

SEQ ID NO: 3597 - DNA, 453 bp, Mus musculus
  misc_feature (43)..(104): n is a, c, g, or t
  misc_feature (161)..(161): n is a, c, g, or t
  misc_feature (176)..(176): n is a, c, g, or t
  misc_feature (181)..(181): n is a, c, g, or t
  misc_feature (183)..(183): n is a, c, g, or t
  misc_feature (187)..(187): n is a, c, g, or t
  misc_feature (216)..(216): n is a, c, g, or t
  misc_feature (245)..(245): n is a, c, g, or t
  misc_feature (276)..(276): n is a, c, g, or t
  misc_feature (311)..(311): n is a, c, g, or t
  misc_feature (320)..(320): n is a, c, g, or t
gcttctaaactccaagggtggaaagaagaaaaagtcctgaggnnnnnnnnnnnnnnnnnnnnnnnnnnnnnnnnnnnnnnnnnnnnnnnnnnnnnnnnnnnnnngccatatcaccacctgatagtaccataaagagctctggatatctcctgtgtgagatntagaaatcgacctanttttnancgantttgctaggaggaactgtgatccccccancccaggcaggtgggttcctggaaaacatnccgtagttgagtttagactttccaggttttnttagcctcgatccgtggagaaacttgcctgttttntttgagttnttgtgttagccagtgtcagtatttattgtttcccactgtgttaacacaggaagagttttgcaagtgtgttaattaatgttaaatgataactagaaatgtttcctttaataaagaatggctgtactcagcatgc

SEQ ID NO: 3598 - DNA, 453 bp, Mus musculus; identical to SEQ ID NO: 3597
  misc_feature (43)..(104): n is a, c, g, or t
  misc_feature (161)..(161): n is a, c, g, or t
  misc_feature (176)..(176): n is a, c, g, or t
  misc_feature (181)..(181): n is a, c, g, or t
  misc_feature (183)..(183): n is a, c, g, or t
  misc_feature (187)..(187): n is a, c, g, or t
  misc_feature (216)..(216): n is a, c, g, or t
  misc_feature (245)..(245): n is a, c, g, or t
  misc_feature (276)..(276): n is a, c, g, or t
  misc_feature (311)..(311): n is a, c, g, or t
  misc_feature (320)..(320): n is a, c, g, or t

SEQ ID NO: 3599 - DNA, 221 bp, Mus musculus
ttccaacagtggaatgatgccaaatggcaagagatttcccacaccttctctgattaccctccaggtgtccgtcacatcctttttcaacacgggggccaggacactcagttctggaaaggctggtacggcccccgtgtcaccaacagcagcatcattatcagccacaggacagccaagaaccctccccctgccagaactctaccggaagaaactgtagtaat

SEQ ID NO: 3600 - DNA, 221 bp, Mus musculus; identical to SEQ ID NO: 3599

SEQ ID NO: 3601 - DNA, 371 bp, Mus musculus
  misc_feature (57)..(93): n is a, c, g, or t
  misc_feature (103)..(103): n is a, c, g, or t
  misc_feature (107)..(121): n is a, c, g, or t
  misc_feature (123)..(123): n is a, c, g, or t
  misc_feature (125)..(126): n is a, c, g, or t
  misc_feature (128)..(128): n is a, c, g, or t
  misc_feature (138)..(138): n is a, c, g, or t
  misc_feature (141)..(141): n is a, c, g, or t
  misc_feature (143)..(143): n is a, c, g, or t
  misc_feature (145)..(145): n is a, c, g, or t
  misc_feature (149)..(149): n is a, c, g, or t
  misc_feature (167)..(167): n is a, c, g, or t
  misc_feature (172)..(173): n is a, c, g, or t
  misc_feature (175)..(176): n is a, c, g, or t
  misc_feature (178)..(179): n is a, c, g, or t
  misc_feature (194)..(194): n is a, c, g, or t
  misc_feature (244)..(244): n is a, c, g, or t
  misc_feature (246)..(246): n is a, c, g, or t
  misc_feature (262)..(262): n is a, c, g, or t
  misc_feature (264)..(264): n is a, c, g, or t
  misc_feature (281)..(281): n is a, c, g, or t
  misc_feature (283)..(283): n is a, c, g, or t
  misc_feature (318)..(318): n is a, c, g, or t
  misc_feature (332)..(332): n is a, c, g, or t
gctggagccatcccctgagtcagaagctgtggaaaaggatgaggactactgggaggnnnnnnnnnnnnnnnnnnnnnnnnnnnnnnnnnnnnnaaaattattngatnnnnnnnnnnnnnnntnanntngggaactgcncancntncagngcattggccagaagaaancccanntnntnntgggctggagggagntccacggccccttcagtgaggtggaggacttggaacaggtggaaggcatntntgggaagcaggtggantntttcctgaaggcgaatntnttgagcttggccgccagccagcacagcggtccctnttgacactaccttnttttaaaaatccttgtatagtgacgtgttgtgtaaatac

SEQ ID NO: 3602 - DNA, 371 bp, Mus musculus; identical to SEQ ID NO: 3601
  misc_feature (57)..(93): n is a, c, g, or t
  misc_feature (103)..(103): n is a, c, g, or t
  misc_feature (107)..(121): n is a, c, g, or t
  misc_feature (123)..(123): n is a, c, g, or t
  misc_feature (125)..(126): n is a, c, g, or t
  misc_feature (128)..(128): n is a, c, g, or t
  misc_feature (138)..(138): n is a, c, g, or t
  misc_feature (141)..(141): n is a, c, g, or t
  misc_feature (143)..(143): n is a, c, g, or t
  misc_feature (145)..(145): n is a, c, g, or t
  misc_feature (149)..(149): n is a, c, g, or t
  misc_feature (167)..(167): n is a, c, g, or t
  misc_feature (172)..(173): n is a, c, g, or t
  misc_feature (175)..(176): n is a, c, g, or t
  misc_feature (178)..(179): n is a, c, g, or t
  misc_feature (194)..(194): n is a, c, g, or t
  misc_feature (244)..(244): n is a, c, g, or t
  misc_feature (246)..(246): n is a, c, g, or t
  misc_feature (262)..(262): n is a, c, g, or t
  misc_feature (264)..(264): n is a, c, g, or t
  misc_feature (281)..(281): n is a, c, g, or t
  misc_feature (283)..(283): n is a, c, g, or t
  misc_feature (318)..(318): n is a, c, g, or t
  misc_feature (332)..(332): n is a, c, g, or t

SEQ ID NO: 3603 - DNA, 438 bp, Mus musculus
  misc_feature (37)..(52): n is a, c, g, or t
  misc_feature (71)..(71): n is a, c, g, or t
  misc_feature (111)..(125): n is a, c, g, or t
  misc_feature (234)..(234): n is a, c, g, or t
  misc_feature (277)..(277): n is a, c, g, or t
  misc_feature (295)..(296): n is a, c, g, or t
  misc_feature (307)..(307): n is a, c, g, or t
  misc_feature (309)..(323): n is a, c, g, or t
  misc_feature (326)..(326): n is a, c, g, or t
  misc_feature (328)..(328): n is a, c, g, or t
  misc_feature (330)..(334): n is a, c, g, or t
gtttttgcagtcagggacagaaatcgtgatatttggnnnnnnnnnnnnnnnntatcctggggcattgggtntggtgagggatatggcttctacaccaaggtactgaattannnnnnnnnnnnnnngaaagagatgggagacgaaaactgaacccagtgttcactgggtcagaatccagggtatagtgtattaaaaaaaatgtatctgaccaattgttgataagcactatgattntcatataaaaatcaaagatgcagaacgtgtatagaataaactntcttttctgtaatcccannaaaaaaaaaanannnnnnnnnnnnnnnaananannnnnattgtgtggcccagtgtggagagccgcaataacatttaccatcataagatggcactggctcctcagtgccttatgccacctaaacaaagaacaagctatatgcg

SEQ ID NO: 3604 - DNA, 438 bp, Mus musculus; identical to SEQ ID NO: 3603
  misc_feature (37)..(52): n is a, c, g, or t
  misc_feature (71)..(71): n is a, c, g, or t
  misc_feature (111)..(125): n is a, c, g, or t
  misc_feature (234)..(234): n is a, c, g, or t
  misc_feature (277)..(277): n is a, c, g, or t
  misc_feature (295)..(296): n is a, c, g, or t
  misc_feature (307)..(307): n is a, c, g, or t
  misc_feature (309)..(323): n is a, c, g, or t
  misc_feature (326)..(326): n is a, c, g, or t
  misc_feature (328)..(328): n is a, c, g, or t
  misc_feature (330)..(334): n is a, c, g, or t

SEQ ID NO: 3605 - DNA, 508 bp, Mus musculus
  misc_feature (29)..(43): n is a, c, g, or t
  misc_feature (152)..(152): n is a, c, g, or t
  misc_feature (195)..(195): n is a, c, g, or t
  misc_feature (213)..(214): n is a, c, g, or t
  misc_feature (225)..(225): n is a, c, g, or t
  misc_feature (227)..(241): n is a, c, g, or t
  misc_feature (244)..(244): n is a, c, g, or t
  misc_feature (246)..(246): n is a, c, g, or t
  misc_feature (248)..(252): n is a, c, g, or t
  misc_feature (453)..(474): n is a, c, g, or t
atggcttctacaccaaggtactgaattannnnnnnnnnnnnnngaaagagatgggagacgaaaactgaacccagtgttcactgggtcagaatccagggtatagtgtattaaaaaaaatgtatctgaccaattgttgataagcactatgattntcatataaaaatcaaagatgcagaacgtgtatagaataaactntcttttctgtaatcccannaaaaaaaaaanannnnnnnnnnnnnnnaananannnnnattgtgtggcccagtgtggagagccgcaataacatttaccatcataagatggcactggctcctcagtgccttatgccacctaaacaaagaacaagctatatgcgcatgtgctaggagcaaaagcccgccaaaagtcactagtccaccctggggcttgggagatcgtgggtggagcaaccagtcatagttaggcacgtcacnnnnnnnnnnnnnnnnnnnnnncgtttctgagcctttttgcctttctcgtcaagat

SEQ ID NO: 3606 - DNA, 508 bp, Mus musculus; identical to SEQ ID NO: 3605
  misc_feature (29)..(43): n is a, c, g, or t
  misc_feature (152)..(152): n is a, c, g, or t
  misc_feature (195)..(195): n is a, c, g, or t
  misc_feature (213)..(214): n is a, c, g, or t
  misc_feature (225)..(225): n is a, c, g, or t
  misc_feature (227)..(241): n is a, c, g, or t
  misc_feature (244)..(244): n is a, c, g, or t
  misc_feature (246)..(246): n is a, c, g, or t
  misc_feature (248)..(252): n is a, c, g, or t
  misc_feature (453)..(474): n is a, c, g, or t

SEQ ID NO: 3607 - DNA, 117 bp, Mus musculus
tctagctcctctagttccagctcgtcagactcggactcagagtgtgaatctgggtcagaaggtgatgggacgacacaccgcaggaagaagaggagaacctgcagcatggtgggaaat

SEQ ID NO: 3608 - DNA, 117 bp, Mus musculus; identical to SEQ ID NO: 3607

SEQ ID NO: 3609 - DNA, 507 bp, Mus musculus
  misc_feature (26)..(57): n is a, c, g, or t
  misc_feature (410)..(410): n is a, c, g, or t
  misc_feature (447)..(447): n is a, c, g, or t
  misc_feature (452)..(452): n is a, c, g, or t
  misc_feature (461)..(461): n is a, c, g, or t
  misc_feature (464)..(478): n is a, c, g, or t
cagtctgacagcttctacttcgtggnnnnnnnnnnnnnnnnnnnnnnnnnnnnnnnntattcctacagtgggacaccctgacccctaatgctgcccctgaggctctggcctagaccctgtgctgtaacctctccgacatcatctccacttggggatggatccggtggctctggaccctgagtcagtctcgagaggaaaggtgtccagcatccctaggcaaacctctggagctagtgggaggggcagcagggggaggctggctgtccccatgttcaggaaggcctcctgcaagaggaggactcctggatgcctcgctaggtccactgggcctgagtttcagagtagtgcccccttcttgaccgtgactagatcaggttagggaccatttcctgtcccttgcccaccacctncaggctatttatagttgtcggttcacagacaaagatncacantgggtaccntgnnnnnnnnnnnnnnntcctccatcaggggccaagaaactacccg

SEQ ID NO: 3610 - DNA, 507 bp, Mus musculus; identical to SEQ ID NO: 3609
  misc_feature (26)..(57): n is a, c, g, or t
  misc_feature (410)..(410): n is a, c, g, or t
  misc_feature (447)..(447): n is a, c, g, or t
  misc_feature (452)..(452): n is a, c, g, or t
  misc_feature (461)..(461): n is a, c, g, or t
  misc_feature (464)..(478): n is a, c, g, or t

SEQ ID NO: 3611 - DNA, 495 bp, Mus musculus
  misc_feature (90)..(110): n is a, c, g, or t
  misc_feature (241)..(241): n is a, c, g, or t
  misc_feature (267)..(267): n is a, c, g, or t
  misc_feature (269)..(269): n is a, c, g, or t
  misc_feature (282)..(282): n is a, c, g, or t
  misc_feature (285)..(285): n is a, c, g, or t
  misc_feature (343)..(343): n is a, c, g, or t
gtcttttgtactcttccaggtccctcctaccctcatactttcccccattctacactgtgcttattaaatgacaaagactcttctaagaannnnnnnnnnnnnnnnnnnnnagctagaaacattgcagaatgaaacatctagaactgcagtggaagacgagagcatcagctctccgagagccttctggtcctctctgcgtggtgattgtgtaggatgcggggtggtgattttcatgtttctnttcagtcagaggcaacagttgatgtntntgccgaactgttnttnggctgacatggttttaataacgctttaaaatttctgctacagagcttggagtagagtnttaccagtttcaaatgttggctgcagcttaaaaatgtgattcttttcagtgtaataagttcacaagctaagttttcaaagagaattttgcttcacattatgcttcttgtctatttgggatcagaaatatgccttttcaatcatgggattgtc

SEQ ID NO: 3612 - DNA, 495 bp, Mus musculus; identical to SEQ ID NO: 3611
  misc_feature (90)..(110): n is a, c, g, or t
  misc_feature (241)..(241): n is a, c, g, or t
  misc_feature (267)..(267): n is a, c, g, or t
  misc_feature (269)..(269): n is a, c, g, or t
  misc_feature (282)..(282): n is a, c, g, or t
  misc_feature (285)..(285): n is a, c, g, or t
  misc_feature (343)..(343): n is a, c, g, or t

SEQ ID NO: 3613 - DNA, 519 bp, Mus musculus
  misc_feature (26)..(26): n is a, c, g, or t
  misc_feature (28)..(28): n is a, c, g, or t
  misc_feature (35)..(35): n is a, c, g, or t
  misc_feature (39)..(41): n is a, c, g, or t
  misc_feature (49)..(50): n is a, c, g, or t
  misc_feature (52)..(52): n is a, c, g, or t
  misc_feature (62)..(62): n is a, c, g, or t
  misc_feature (114)..(114): n is a, c, g, or t
  misc_feature (116)..(116): n is a, c, g, or t
  misc_feature (351)..(364): n is a, c, g, or t
  misc_feature (366)..(366): n is a, c, g, or t
  misc_feature (383)..(400): n is a, c, g, or t
tgacttatcgagacaatgaccaatcntnaatttgntgannntccaaagnngnacgtattacngcctgctgccttgagttcttcctcaaatgaaaaccacccaggaggccacagnanatgactgtaagatgaacccatttctccactggattctcaacagtaatcttcacctgcagcttccacacatgatacccatattttggacaactgccttgtatgttttattaggaagttccaatctttgcatgaggtaatctttagtcagagatagatagcatacagttctcaatggacatcaggtttgtttaattatattttcacaaatggcatcaagttgttccccagctggccnnnnnnnnnnnnnnanatctcacaagtcaaatnnnnnnnnnnnnnnnnnngttagcagctcagcaggtgacatcacaatgtttgctctgttcaggtgtccaaccttttcaccagtgtgatcagtagtcagctctctccttgagaaacgatctggctactgtagccagaa

SEQ ID NO: 3614 - DNA, 519 bp, Mus musculus; identical to SEQ ID NO: 3613
  misc_feature (26)..(26): n is a, c, g, or t
  misc_feature (28)..(28): n is a, c, g, or t
  misc_feature (35)..(35): n is a, c, g, or t
  misc_feature (39)..(41): n is a, c, g, or t
  misc_feature (49)..(50): n is a, c, g, or t
  misc_feature (52)..(52): n is a, c, g, or t
  misc_feature (62)..(62): n is a, c, g, or t
  misc_feature (114)..(114): n is a, c, g, or t
  misc_feature (116)..(116): n is a, c, g, or t
  misc_feature (351)..(364): n is a, c, g, or t
  misc_feature (366)..(366): n is a, c, g, or t
  misc_feature (383)..(400): n is a, c, g, or t

SEQ ID NO: 3615 - DNA, 477 bp, Mus musculus
  misc_feature (450)..(450): n is a, c, g, or t
atttgaggatggactacgctatccctttattgtcaaccaccccaaggtcggccgagtcagtgtttatgattccaaaagacagtccggaaagaccaaggaaacaagcgtcaactggtgcatggctgatggctatgacctagagatcctggatggcaccagaggcactgtggatggaccagggaaagagttgtctcgggtgtccaagaagaatattttccttcagtttaagaagctctgctccttccgagcccgcagagatttactgcagctctcttatggtgaagccaagaaagctgcccgtgactatgacttagccaagaactacttcaagaaaagcctgcgagacatgggctatgggaattggatcagcaaaccccaggaggaaaagaacttttacctctgtccagtacccaatgactgatagtggggcgcgtttctcctggggtcagnagggcggtcatggcattcctcatcaca

SEQ ID NO: 3616 - DNA, 477 bp, Mus musculus; identical to SEQ ID NO: 3615
  misc_feature (450)..(450): n is a, c, g, or t

SEQ ID NO: 3617 - DNA, 142 bp, Mus musculus
  misc_feature (83)..(83): n is a, c, g, or t
ttacattgctggtcttgtaagagctctacacttttcctacatgtacctacaactacagcagttcatctatttcaggaagttgnattctgttcatttgttctctttaagaccacctcagataaaaggctaccttattgtacgt

SEQ ID NO: 3618 - DNA, 142 bp, Mus musculus; identical to SEQ ID NO: 3617
  misc_feature (83)..(83): n is a, c, g, or t

SEQ ID NO: 3619 - DNA, 469 bp, Mus musculus
  misc_feature (191)..(191): n is a, c, g, or t
atacgtgtttctctgtttatggacccggatcccacgccagcgtccactggtcactgccgctgcccacagcgacgtcgcccacgagagcacacacgtagacccagacgccgtggtcaagaatctctgccatccccacgggacggacggacggacggactccacaaggtgcgcgtgtcaccgaggccgccagnatggagccactctcacgattctcaacagggcctgaccgcgtacagaaatgtccccctcaataaaattgctgttgaaatggaaaaaaaaaaaaaaaaaaaaaaaaaaaaaaaaaaaaaaaaaaaaaaaaaaaaccaaaaaaaaaaaaaccggggccgaaggtttttccccttaggtgggggtaatttttggcttggcattggcggtggttttaaaagttcttgactggaaaacccctgggtttccccactttaaccgctttgaggcaattccccctttg

SEQ ID NO: 3620 - DNA, 469 bp, Mus musculus; identical to SEQ ID NO: 3619
  misc_feature (191)..(191): n is a, c, g, or t

SEQ ID NO: 3621 - DNA, 365 bp, Mus musculus
  misc_feature (71)..(71): n is a, c, g, or t
  misc_feature (335)..(335): n is a, c, g, or t
taatgcaaaggctgagacttcagtgacaaaaaggaccagcccttagagagaatttatggtcacaggctagncatagtaactgacaagattagtggaggaaatatttggggaccagcatgcactgtgccatcctgataggcttccccaggtaactatcgattagatgtgaccttggtgttcatggactagagttgtgcaattaattttttcctggctttggtaactaccctgttctagtcacagtccttcacactaggaaaggaaagagagaagaaatagtcactctttttttctttctttcttttttccttggtcaccttcccgtggccttaagntctggagccaagggaaactgcatggaggta

SEQ ID NO: 3622 - DNA, 365 bp, Mus musculus; identical to SEQ ID NO: 3621
  misc_feature (71)..(71): n is a, c, g, or t
  misc_feature (335)..(335): n is a, c, g, or t

SEQ ID NO: 3623 - DNA, 412 bp, Mus musculus
  misc_feature (135)..(137): n is a, c, g, or t
  misc_feature (140)..(140): n is a, c, g, or t
  misc_feature (142)..(147): n is a, c, g, or t
  misc_feature (171)..(171): n is a, c, g, or t
agacctgtgcattcgccgcggttgtcgtagttccggccgagcggccgctggtttctgacggctgggtgctatcctgcgggcaggcactggtcgcggcaggtgtctcgctccgccggcccagctcccgcgggatcnnncgncnnnnnngggccccggcgccgcactcacggnggctccgtcgcaggcacggagcgaggagcagcccgcgtcctccgaggtcagcgtcatgaggagcctgccgttcttctgccgcggccaggtggtgcgtggcttcggccgcggctccaagcaactgggcatccccacagccaattttcctgaacaagtggtggacaatcttccagctgatgtgtctactggcatttattatggttgggccagcgttgggagcggcgatgtccataaaatggtg

SEQ ID NO: 3624 - DNA, 412 bp, Mus musculus; identical to SEQ ID NO: 3623
  misc_feature (135)..(137): n is a, c, g, or t
  misc_feature (140)..(140): n is a, c, g, or t
  misc_feature (142)..(147): n is a, c, g, or t
  misc_feature (171)..(171): n is a, c, g, or t

SEQ ID NO: 3625 - DNA, 262 bp, Mus musculus
  misc_feature (144)..(147): n is a, c, g, or t
  misc_feature (149)..(153): n is a, c, g, or t
  misc_feature (155)..(158): n is a, c, g, or t
  misc_feature (160)..(165): n is a, c, g, or t
  misc_feature (167)..(168): n is a, c, g, or t
  misc_feature (170)..(170): n is a, c, g, or t
  misc_feature (172)..(172): n is a, c, g, or t
  misc_feature (182)..(182): n is a, c, g, or t
  misc_feature (184)..(185): n is a, c, g, or t
ggtggacaatcttccagctgatgtgtctactggcatttattatggttgggccagcgttgggagcggcgatgtccataaaatggtggtgagcattggatggaacccgtactataagaatgtgaaaaagtccatggaaacacacannnncnnnnncnnnnannnnnncnncnanggggaaattntnnatgtggccattgttggctatctcagacctgaaaagaactttgattctttagagtcacttatttctgcaattcaaggt

SEQ ID NO: 3626 - DNA, 262 bp, Mus musculus; identical to SEQ ID NO: 3625
  misc_feature (144)..(147): n is a, c, g, or t
  misc_feature (149)..(153): n is a, c, g, or t
  misc_feature (155)..(158): n is a, c, g, or t
  misc_feature (160)..(165): n is a, c, g, or t
  misc_feature (167)..(168): n is a, c, g, or t
  misc_feature (170)..(170): n is a, c, g, or t
  misc_feature (172)..(172): n is a, c, g, or t
  misc_feature (182)..(182): n is a, c, g, or t
  misc_feature (184)..(185): n is a, c, g, or t

SEQ ID NO: 3627 - DNA, 555 bp, Mus musculus
gccacctgcgctcgtgggcatcaggcctgcaggcccgggccgcggcgcccggcgcctcctggtgctggaggagttcaagacggagaagaggctgtgcaagatgttctacgccatcacgctgctcttcctgctcctctggggcccctatgtggtggccagttacctgcgcgtcctggtgcgcccgggagctgtcccgcaggcctacctgacagcctcggtgtggctgacattcgcgcaggccggcatcaaccccgtggtgtgtttcctcttcaaccgggagctgagggactgtttccgagcccagtttccctgctgccagagcccccaggccacgcaggccaccctcccctgcgacctgaaaggcattggtttgtgaagcgcgctctgccacccaggctccctctggcttcgattgtgaccgctcatctttcccttctgtcccgttgtctggtttttctctgctgccttcaggagactctgaaagtggacacgcacttggattgtatagacccctgttctggggccgggggagggatgctgaggtcccgttctgtc

SEQ ID NO: 3628 - DNA, 555 bp, Mus musculus; identical to SEQ ID NO: 3627

SEQ ID NO: 3629 - DNA, 535 bp, Mus musculus
  misc_feature (108)..(123): n is a, c, g, or t
  misc_feature (132)..(132): n is a, c, g, or t
  misc_feature (137)..(137): n is a, c, g, or t
  misc_feature (147)..(163): n is a, c, g, or t
  misc_feature (331)..(332): n is a, c, g, or t
  misc_feature (335)..(335): n is a, c, g, or t
  misc_feature (337)..(337): n is a, c, g, or t
  misc_feature (351)..(351): n is a, c, g, or t
  misc_feature (360)..(360): n is a, c, g, or t
  misc_feature (362)..(362): n is a, c, g, or t
  misc_feature (369)..(369): n is a, c, g, or t
  misc_feature (385)..(385): n is a, c, g, or t
  misc_feature (476)..(476): n is a, c, g, or t
tcattgcaagtaggaggaccgtaaatggcattttacatgactgcaagtattgttataccgaatcctattttaaaagagttttagtaacggtgagctgagaaattctgnnnnnnnnnnnnnnnnggcgcaacnatgcnagcctgtggnnnnnnnnnnnnnnnnngtggaggctgttgatttcaaccttttttaaacttgtgttttttagtaaaattgcttatttttttcccaaaggtggaatttaatgttttgtagtgatgaatatgaaaatgcctgtcatctttagatcattgaaaggttaactaacatgagaatttcagagcaaattccnntantnttttaaaaagcgtntctgccctntnttacttntatgtatttgtttatngacacactcaccctttctgagatagcattttgctcccttgatccccccctttttttgtcccttcgaagagtaaatgctttgtatttctttntttaaaaaatttactttaaagaagaagccacttgaaccttcaataaaggctgttgccta

SEQ ID NO: 3630 - DNA, 535 bp, Mus musculus; identical to SEQ ID NO: 3629
  misc_feature (108)..(123): n is a, c, g, or t
  misc_feature (132)..(132): n is a, c, g, or t
  misc_feature (137)..(137): n is a, c, g, or t
  misc_feature (147)..(163): n is a, c, g, or t
  misc_feature (331)..(332): n is a, c, g, or t
  misc_feature (335)..(335): n is a, c, g, or t
  misc_feature (337)..(337): n is a, c, g, or t
  misc_feature (351)..(351): n is a, c, g, or t
  misc_feature (360)..(360): n is a, c, g, or t
  misc_feature (362)..(362): n is a, c, g, or t
  misc_feature (369)..(369): n is a, c, g, or t
  misc_feature (385)..(385): n is a, c, g, or t
  misc_feature (476)..(476): n is a, c, g, or t

SEQ ID NO: 3631 - DNA, 304 bp, Mus musculus
ggtagactgcctgaacccccaggctccttgcacacagcctccctcctgctacgtggagctcaagacatccaaggagatgcacagccctggccagtggaggagcttttacagacacaagttgctgaaatggtgggctcagtcgttcctcccgggggtcccacatgttgttgccggcttccggaacccagaaggtttcgtctgttccttaaagacctttcctaccatggagatgtttgaaaatgtcaggaatgaccgagaaggctggaatccctctgtgtgcatgaacttctgtgctgccttcctt

SEQ ID NO: 3632 - DNA, 89 bp, Mus musculus
gttgtccccactggggcaggcggcggcggtggtgaaggaacgagggtgcacggggcctccccgaggggccaagtgagaggccggcagcc

SEQ ID NO: 3633 - DNA, 89 bp, Mus musculus; identical to SEQ ID NO: 3632

SEQ ID NO: 3634 - DNA, 274 bp, Mus musculus
  misc_feature (87)..(102): n is a, c, g, or t
aggcttctggatacgccttcactaattacttgatagagtgggtaaagcagaggcctggacagggccttgagtggattggagtgattnnnnnnnnnnnnnnnngtactaactacaatgagaagttcaagggcaaggcaacactgactgcagacaaatcctccagcactgcctacatgcagctcagcagcctgacatctgaggactctgcggtctatttctgtgcaagagaggcttatggtaactgctttgactactggggccaaggcaccactct

SEQ ID NO: 3635 - DNA, 274 bp, Mus musculus; identical to SEQ ID NO: 3634
  misc_feature (87)..(102): n is a, c, g, or t

SEQ ID NO: 3636 - DNA, 195 bp, Mus musculus
  misc_feature (85)..(105): n is a, c, g, or t
agccgggagaacaatccgtgccactcactcgactcgagccaaggacctggccgaaaggaaggttaaggtaatgggcaaggacctnnnnnnnnnnnnnnnnnnnnngacctcacagccaggcacctcagtcttccctgtgtggctttggcttggagtttgtagctgcagcatggatcttactgcacagtgcacagt

SEQ ID NO: 3637 - DNA, 195 bp, Mus musculus; identical to SEQ ID NO: 3636
  misc_feature (85)..(105): n is a, c, g, or t

SEQ ID NO: 3638 - DNA, 577 bp, Mus musculus
  misc_feature (130)..(148): n is a, c, g, or t
  misc_feature (190)..(208): n is a, c, g, or t
  misc_feature (468)..(468): n is a, c, g, or t
ccagcaggttgtgatggtgaagtacttggctaccctggagcggctggctccgcgctttggctcagagcgcatacctgtgtgtcatctggaggtcctggcacagcccgagagggacccctgctacatccannnnnnnnnnnnnnnnnnnggggatccaggcccagagctgccttccgggcctcccacccannnnnnnnnnnnnnnnnnnaccggaggtatccagtggcatccgctgcagacccaggaatctgagagaggtaacagcagagggaatccccacggcagccggtcggggaagaagcccaaagcccccgaggctggagagcacctgacagagagccctcaggaaccaccttggacctacttctgtgacttccaggacatttcccacgtggtgctaaaggagcgtcgcgtgcacatccacctccaagacaacaagtgcttgttgctgtgtctctgttcccaggntgaggccctgtcctttgtggccctggtcgatggctatttccgcttgactgctgactccagccactacctgtgccatgaggtggcacccccgaggctggtgactagcatc

SEQ ID NO: 3639 - DNA, 577 bp, Mus musculus; identical to SEQ ID NO: 3638
  misc_feature (130)..(148): n is a, c, g, or t
  misc_feature (190)..(208): n is a, c, g, or t
  misc_feature (468)..(468): n is a, c, g, or t

SEQ ID NO: 3640 - DNA, 538 bp, Mus musculus
  misc_feature (229)..(229): n is a, c, g, or t
  misc_feature (232)..(232): n is a, c, g, or t
  misc_feature (240)..(240): n is a, c, g, or t
  misc_feature (248)..(248): n is a, c, g, or t
  misc_feature (250)..(250): n is a, c, g, or t
  misc_feature (254)..(254): n is a, c, g, or t
  misc_feature (257)..(258): n is a, c, g, or t
  misc_feature (261)..(261): n is a, c, g, or t
  misc_feature (264)..(264): n is a, c, g, or t
  misc_feature (267)..(268): n is a, c, g, or t
  misc_feature (270)..(270): n is a, c, g, or t
  misc_feature (272)..(272): n is a, c, g, or t
  misc_feature (274)..(274): n is a, c, g, or t
  misc_feature (276)..(276): n is a, c, g, or t
  misc_feature (279)..(279): n is a, c, g, or t
  misc_feature (281)..(281): n is a, c, g, or t
  misc_feature (283)..(283): n is a, c, g, or t
  misc_feature (295)..(301): n is a, c, g, or t
  misc_feature (303)..(303): n is a, c, g, or t
  misc_feature (305)..(312): n is a, c, g, or t
  misc_feature (314)..(319): n is a, c, g, or t
  misc_feature (321)..(324): n is a, c, g, or t
  misc_feature (326)..(326): n is a, c, g, or t
  misc_feature (330)..(330): n is a, c, g, or t
  misc_feature (333)..(333): n is a, c, g, or t
  misc_feature (337)..(337): n is a, c, g, or t
  misc_feature (348)..(348): n is a, c, g, or t
  misc_feature (354)..(354): n is a, c, g, or t
  misc_feature (367)..(367): n is a, c, g, or t
  misc_feature (371)..(371): n is a, c, g, or t
  misc_feature (373)..(373): n is a, c, g, or t
  misc_feature (378)..(378): n is a, c, g, or t
  misc_feature (383)..(383): n is a, c, g, or t
  misc_feature (391)..(405): n is a, c, g, or t
  misc_feature (455)..(482): n is a, c, g, or t
  misc_feature (484)..(485): n is a, c, g, or t
gtgtgttcgccgagcgctactcacgcgaggtcttcgaaagaaccaagcagctccttttccaaggggctcgggcctatagagatcacatatcgagcgaagattgttccgtgaaccacctgcaggagtcactgaagtctggtgtggtaggagcccctcaacctgcgaggggacagatgttgattggacctgatggccgactgacacggtgccaagctcaggcctcagaagntgnccttcccnaggacagncncccntcnnttnttnatnntncntnanatntntngatgggaaggcnnnnnnnancnnnnnnnnannnnnncnnnntntggncantgtntatacacctgntggggntgcggtgctttgncctntntgctntgtgnccttgcannnnnnnnnnnnnnnggtgagaagacactgtgcaccagctgtgctatgtttgaagcctgaggtgnnnnnnnnnnnnnnnnnnnnnnnnnnnncnntaaagagagagaaggtggctttttatatgttatgttttatacccagtaacaag

SEQ ID NO: 3641 - DNA, 538 bp, Mus musculus; identical to SEQ ID NO: 3640
  misc_feature (229)..(229): n is a, c, g, or t
  misc_feature (232)..(232): n is a, c, g, or t
  misc_feature (240)..(240): n is a, c, g, or t
  misc_feature (248)..(248): n is a, c, g, or t
  misc_feature (250)..(250): n is a, c, g, or t
  misc_feature (254)..(254): n is a, c, g, or t
  misc_feature (257)..(258): n is a, c, g, or t
  misc_feature (261)..(261): n is a, c, g, or t
  misc_feature (264)..(264): n is a, c, g, or t
  misc_feature (267)..(268): n is a, c, g, or t
  misc_feature (270)..(270): n is a, c, g, or t
  misc_feature (272)..(272): n is a, c, g, or t
  misc_feature (274)..(274): n is a, c, g, or t
  misc_feature (276)..(276): n is a, c, g, or t
  misc_feature (279)..(279): n is a, c, g, or t
  misc_feature (281)..(281): n is a, c, g, or t
  misc_feature (283)..(283): n is a, c, g, or t
  misc_feature (295)..(301): n is a, c, g, or t
  misc_feature (303)..(303): n is a, c, g, or t
  misc_feature (305)..(312): n is a, c, g, or t
  misc_feature (314)..(319): n is a, c, g, or t
  misc_feature (321)..(324): n is a, c, g, or t
  misc_feature (326)..(326): n is a, c, g, or t
  misc_feature (330)..(330): n is a, c, g, or t
  misc_feature (333)..(333): n is a, c, g, or t
  misc_feature (337)..(337): n is a, c, g, or t
  misc_feature (348)..(348): n is a, c, g, or t
  misc_feature (354)..(354): n is a, c, g, or t
  misc_feature (367)..(367): n is a, c, g, or t
  misc_feature (371)..(371): n is a, c, g, or t
  misc_feature (373)..(373): n is a, c, g, or t
  misc_feature (378)..(378): n is a, c, g, or t
  misc_feature (383)..(383): n is a, c, g, or t
  misc_feature (391)..(405): n is a, c, g, or t
  misc_feature (455)..(482): n is a, c, g, or t
  misc_feature (484)..(485): n is a, c, g, or t

SEQ ID NO: 3642 - DNA, 210 bp, Mus musculus
  misc_feature (27)..(28): n is a, c, g, or t
gggtttgctctggttgcagcagcaacnntctgtgaggccaacactgatgtgtattgaagccacatcacccagggcagtagctgctctactctgcctttgccaaggcttgtccccagctgtggtcctgacagccctttctccctccatcgtgcataataagaatccaaaggtattggaaaagaaaccccatacattgtcacttccttgagg

SEQ ID NO: 3643 - DNA, 210 bp, Mus musculus; identical to SEQ ID NO: 3642
  misc_feature (27)..(28): n is a, c, g, or t

SEQ ID NO: 3644 - DNA, 287 bp, Mus musculus
gaaaccctcactgctttcacgtgcttttcccacttgattggctatgtcctctgtccctccaagtgaagtctaatacctaattctaagtttatagttaacaagcagtttaatttttaagaaatcttaacttttcctgtacatgacacaattgacaatccctattcctttgtgtccttgtgtttggattactcctgggtatctttcttctggtctcttcatttaacctaagtatcattcctcagactttttgctcttaagtcactggaccgtacttttgagtaatttca

SEQ ID NO: 3645 - DNA, 287 bp, Mus musculus; identical to SEQ ID NO: 3644

SEQ ID NO: 3646 - DNA, 364 bp, Mus musculus
  misc_feature (107)..(174): n is a, c, g, or t
aatgacatgcagcagttggctcgggaaacctccaaggacccagagttaaggagcaaactgcagaagttgaagtcggatggggcgctggtggactgtgggacttcagnnnnnnnnnnnnnnnnnnnnnnnnnnnnnnnnnnnnnnnnnnnnnnnnnnnnnnnnnnnnnnnnnnnntgttaagctcatgtcctgtcacagtggcccccttctccccccccccccaagccctgcctaacacacatataagcccttcaacccagccagcagcgagcggtgggcactgccagtcctcggaaggcttctgcagaggcttgggagcgagctgatgtgcactggagttctctgtcccctggaagagtgcttt

SEQ ID NO: 3647 - DNA, 364 bp, Mus musculus; identical to SEQ ID NO: 3646
  misc_feature (107)..(174): n is a, c, g, or t

SEQ ID NO: 3648 - DNA, 547 bp, Mus musculus
  misc_feature (242)..(242): n is a, c, g, or t
  misc_feature (271)..(285): n is a, c, g, or t
  misc_feature (287)..(287): n is a, c, g, or t
  misc_feature (290)..(290): n is a, c, g, or t
  misc_feature (293)..(293): n is a, c, g, or t
  misc_feature (296)..(296): n is a, c, g, or t
  misc_feature (302)..(302): n is a, c, g, or t
  misc_feature (308)..(308): n is a, c, g, or t
  misc_feature (312)..(312): n is a, c, g, or t
  misc_feature (314)..(314): n is a, c, g, or t
  misc_feature (316)..(322): n is a, c, g, or t
  misc_feature (324)..(325): n is a, c, g, or t
  misc_feature (328)..(328): n is a, c, g, or t
  misc_feature (330)..(331): n is a, c, g, or t
  misc_feature (352)..(352): n is a, c, g, or t
  misc_feature (354)..(354): n is a, c, g, or t
  misc_feature (362)..(362): n is a, c, g, or t
  misc_feature (366)..(366): n is a, c, g, or t
  misc_feature (368)..(368): n is a, c, g, or t
  misc_feature (370)..(370): n is a, c, g, or t
  misc_feature (381)..(381): n is a, c, g, or t
  misc_feature (383)..(383): n is a, c, g, or t
  misc_feature (394)..(394): n is a, c, g, or t
  misc_feature (401)..(401): n is a, c, g, or t
  misc_feature (441)..(441): n is a, c, g, or t
  misc_feature (445)..(445): n is a, c, g, or t
  misc_feature (447)..(447): n is a, c, g, or t
  misc_feature (458)..(458): n is a, c, g, or t
  misc_feature (481)..(481): n is a, c, g, or t
tgacttgaaatgtccggtgtcatttcagaatacaaagctagtgtctctaagatcttagattcgttgcttacagatgtgagtgaagatactgtgggggacgatcctcctggaggattaccttatttttttcctttcgattttgtttttagaaatttagtccttgcttgtagacaacaaaagatggttttaagaactgtttgtggaatgtgtttggagggttaattctagaacctttgtatatntaatagtatttctaacttttatttctttnnnnnnnnnnnnnnntnttnttnttntgctangcaatnattnanannnnnnntnnttnannttttttagattttcctggatntntagtttanacanantntatttaaaacngnagcggtagttngcagttntagcaaagaggaaagttgtggggttaaactttgtattttntttntnatagaagcttntaaaaaggtatttttatatgttntttttaacaaatattgtgtacaacctttaaaacatcaatgtttggatcaaaacaagacccagctta

SEQ ID NO: 3649 - DNA, 547 bp, Mus musculus; identical to SEQ ID NO: 3648
  misc_feature (242)..(242): n is a, c, g, or t
  misc_feature (271)..(285): n is a, c, g, or t
  misc_feature (287)..(287): n is a, c, g, or t
  misc_feature (290)..(290): n is a, c, g, or t
  misc_feature (293)..(293): n is a, c, g, or t
  misc_feature (296)..(296): n is a, c, g, or t
  misc_feature (302)..(302): n is a, c, g, or t
  misc_feature (308)..(308): n is a, c, g, or t
  misc_feature (312)..(312): n is a, c, g, or t
  misc_feature (314)..(314): n is a, c, g, or t
  misc_feature (316)..(322): n is a, c, g, or t
  misc_feature (324)..(325): n is a, c, g, or t
  misc_feature (328)..(328): n is a, c, g, or t
  misc_feature (330)..(331): n is a, c, g, or t
  misc_feature (352)..(352): n is a, c, g, or t
  misc_feature (354)..(354): n is a, c, g, or t
  misc_feature (362)..(362): n is a, c, g, or t
  misc_feature (366)..(366): n is a, c, g, or t
  misc_feature (368)..(368): n is a, c, g, or t
  misc_feature (370)..(370): n is a, c, g, or t
  misc_feature (381)..(381): n is a, c, g, or t
  misc_feature (383)..(383): n is a, c, g, or t
  misc_feature (394)..(394): n is a, c, g, or t
  misc_feature (401)..(401): n is a, c, g, or t
  misc_feature (441)..(441): n is a, c, g, or t
  misc_feature (445)..(445): n is a, c, g, or t
  misc_feature (447)..(447): n is a, c, g, or t
  misc_feature (458)..(458): n is a, c, g, or t
  misc_feature (481)..(481): n is a, c, g, or t

SEQ ID NO: 3650 - DNA, 622 bp, Mus musculus
  misc_feature (176)..(213): n is a, c, g, or t
  misc_feature (296)..(296): n is a, c, g, or t
  misc_feature (303)..(303): n is a, c, g, or t
  misc_feature (319)..(333): n is a, c, g, or t
  misc_feature (380)..(381): n is a, c, g, or t
  misc_feature (383)..(383): n is a, c, g, or t
  misc_feature (386)..(390): n is a, c, g, or t
  misc_feature (409)..(409): n is a, c, g, or t
  misc_feature (428)..(428): n is a, c, g, or t
  misc_feature (435)..(435): n is a, c, g, or t
  misc_feature (438)..(438): n is a, c, g, or t
  misc_feature (490)..(490): n is a, c, g, or t
  misc_feature (492)..(492): n is a, c, g, or t
  misc_feature (547)..(547): n is a, c, g, or t
  misc_feature (549)..(550): n is a, c, g, or t
  misc_feature (552)..(555): n is a, c, g, or t
  misc_feature (557)..(557): n is a, c, g, or t
cccgggaagagtcctgccaagatgtctattggtgtgccgattaaagtcttgcacgaggctgaaggcacatagtgacgtgtgagaccaacaccggggaagtataccgagggaagctcattgaagcagaggacaacatgaactgtcagatgtccaacatcacagtcacatacagagannnnnnnnnnnnnnnnnnnnnnnnnnnnnnnnnnnnnngcagcaagatccgatttctgattttgcctgacatgctgaaaaatgcacccatgttaaagagcatgaaaaataaaaaccaaggntcagggnccggcagaggaaaagnnnnnnnnnnnnnnncccaagtggccgcacgagggagaggacgtgggatgggacgtgggaanntnttnnnnnagaagcgaagataatattntccattgaagagaacgttntcctttnttntctttgattattgcaggggttttggggggagggggtattacatgtgcatatntnttagattttcttttgataaactgttaagctaaataaaatttggttgttttgtggntnnannnnanaaaaaagtgcggcctcctcgggttccttcttagtgcggtgtgattgggtttactcttcaatgttc

SEQ ID NO: 3651 - DNA, 622 bp, Mus musculus; identical to SEQ ID NO: 3650
  misc_feature (176)..(213): n is a, c, g, or t
  misc_feature (296)..(296): n is a, c, g, or t
  misc_feature (303)..(303): n is a, c, g, or t
  misc_feature (319)..(333): n is a, c, g, or t
  misc_feature (380)..(381): n is a, c, g, or t
  misc_feature (383)..(383): n is a, c, g, or t
  misc_feature (386)..(390): n is a, c, g, or t
  misc_feature (409)..(409): n is a, c, g, or t
  misc_feature (428)..(428): n is a, c, g, or t
  misc_feature (435)..(435): n is a, c, g, or t
  misc_feature (438)..(438): n is a, c, g, or t
  misc_feature (490)..(490): n is a, c, g, or t
  misc_feature (492)..(492): n is a, c, g, or t
  misc_feature (547)..(547): n is a, c, g, or t
  misc_feature (549)..(550): n is a, c, g, or t
  misc_feature (552)..(555): n is a, c, g, or t
  misc_feature (557)..(557): n is a, c, g, or t

SEQ ID NO: 3652 - DNA, 264 bp, Mus musculus
  misc_feature (196)..(196): n is a, c, g, or t
tgaagatctctgcagctgccctcaccatcatcctcactgcagccgccctctgcacccccgcacctgcctcaccatatggctcggacaccactccctgctgctttgcctacctctccctcgcgctgcctcgtgcccacgtcaaggagtatttctacaccagcagcaagtgctccaatcttgcagtcgtgtttgtcantcgaaggaaccgccaagtgtgtgccaacccagagaagaagtgggttcaagaatacatcaactatttgg

SEQ ID NO: 3653 - DNA, 264 bp, Mus musculus; identical to SEQ ID NO: 3652
  misc_feature (196)..(196): n is a, c, g, or t

SEQ ID NO: 3654 - DNA, 320 bp, Mus musculus
  misc_feature (67)..(67): n is a, c, g, or t
  misc_feature (110)..(125): n is a, c, g, or t
  misc_feature (202)..(202): n is a, c, g, or t
  misc_feature (239)..(253): n is a, c, g, or t
  misc_feature (263)..(263): n is a, c, g, or t
atggcttcagggacccggagatcacgcagctggtgaacgctggggtcctcactgtccgagatgctgnaagctggtggctggctgtgcctggagctgggagattcatcaannnnnnnnnnnnnnnncgccaggctgtactgagcatggtgcggaaggccaagtaccgggagcttgccttgtcagagctcctgggccgcagggnccctttggcagtgcggctaggtcttgcctaccatgtnnnnnnnnnnnnnnnagcccagctngtggactgtgtccccaccacttctggaaccctccttcgcctgccagatacatgagga

SEQ ID NO: 3655 - DNA, 550 bp, Mus musculus
  misc_feature (103)..(118): n is a, c, g, or t
gctcactggtcctgcgactggagaggagtgctggcatgatgagctgtcactagtagtcccacgtggaggggctcaaagctgtgacccccttgacgtcatctannnnnnnnnnnnnnnnccatagacagtgcagcgcaccctgcgcttccagtccacacctgcccattgcagtcctgtaccccggccgcagctgcggccgcagcttccccatctgcgctgttgcctttggctgtctttgcacttttgttcatgctccaaagaatatttcataatgccttcatactgatgtgcaccctagccattttgtacgtgcccttgggccacagcgactggcctcctcctttgggccagcgtgccgccatctgcacacgacgctgtcttctagggatagatgcccagggaatgaactctagttttctaacggactagctgagatgctaacttactcaacgtgaacaggatgatatgtgtgctgtgtgggcgggccaacgtgtgctcgcagggaactttggggcagaatcctgcagcagggatgcatgcagatggttct

SEQ ID NO: 3656 - DNA, 527 bp, Mus musculus
ggtgagccttagtccctgttagggaccaacccctgtcctgatttcacctcacccagaagtgaacccagcaggatcctggcactggcaatggctgtaccatgcttttccctgtatatggataggctgtagcctgtgtttggaaaaacaaagttgtgttcagcataagaaaagattatacatctgaggtgacacctagtgactcatggtactgctgctggatggacctattctcagtggtcacttggctcaggtcatactgtctcaggaaccatctacgttattcccagtgtcctgtgaggtaagtgtctcatcacacctattctgcagctgtgtatacccacagcttagagaagttgagtctgatagcaagaggctcctgaggcacatctgtgacacttcggcatgagctgtggacattgtgccttcctgctttgcgcttgctcatgtggtcttttccattcaggggcaggtgaggtgtgcaggccactgaacatgcatggagaagatagagattcctcttgaactct

SEQ ID NO: 3657 - DNA, 77 bp, Mus musculus
cattcgcttctaccttgaaaaggatgttaatgtggtcatgttcttagcaccacagtgtctgggcatctgggaaactc

SEQ ID NO: 3658 - DNA, 77 bp, Mus musculus; identical to SEQ ID NO: 3657

SEQ ID NO: 3659 - DNA, 265 bp, Mus musculus
tgaccgttacagatggacagtgtctttttatttataggagtttttcaggatgtcagagtagataggtaggaaaattgttattagaacattcgcttctaccttgaaaaggatgttaatgtggtcatgttcttagcaccacagtgtctgggcatctgggaaactccgagacttttttaaagtgtcatgatgtgatcacacctgcagtttggggcatcgaatccagggccttgcatgtcttctgtaagagctctcatcgctgacctgt

SEQ ID NO: 3660 - DNA, 265 bp, Mus musculus; identical to SEQ ID NO: 3659

SEQ ID NO: 3661 - DNA, 287 bp, Mus musculus
  misc_feature (75)..(75): n is a, c, g, or t
  misc_feature (127)..(127): n is a, c, g, or t
  misc_feature (187)..(187): n is a, c, g, or t
  misc_feature (198)..(198): n is a, c, g, or t
  misc_feature (202)..(202): n is a, c, g, or t
  misc_feature (244)..(244): n is a, c, g, or t
atcctgtgctctctcaagtgctggctgccagtccgtgggagggctgcggcatgtgattcttcatgggctgcagcnaccagatccctggagagctctacctcggggtacagtgagggagttgagaaanatgtgagggtagtgggcatgggggcgtggcataacaggagaactcgggaggccctcaagntcagaggaaantatntcactgtataactacagtaagagaggttgtttaaagtagctncagggcgccctcatggggcagacagcagccttgtggcgtaggt

SEQ ID NO: 3662 - DNA, 287 bp, Mus musculus; identical to SEQ ID NO: 3661
  misc_feature (75)..(75): n is a, c, g, or t
  misc_feature (127)..(127): n is a, c, g, or t
  misc_feature (187)..(187): n is a, c, g, or t
  misc_feature (198)..(198): n is a, c, g, or t
  misc_feature (202)..(202): n is a, c, g, or t
  misc_feature (244)..(244): n is a, c, g, or t

SEQ ID NO: 3663 - DNA, 540 bp, Mus musculus
  misc_feature (39)..(43): n is a, c, g, or t
  misc_feature (66)..(66): n is a, c, g, or t
  misc_feature (113)..(113): n is a, c, g, or t
  misc_feature (115)..(115): n is a, c, g, or t
  misc_feature (192)..(195): n is a, c, g, or t
  misc_feature (197)..(199): n is a, c, g, or t
  misc_feature (202)..(202): n is a, c, g, or t
  misc_feature (204)..(205): n is a, c, g, or t
  misc_feature (207)..(210): n is a, c, g, or t
  misc_feature (212)..(219): n is a, c, g, or t
  misc_feature (346)..(346): n is a, c, g, or t
  misc_feature (350)..(350): n is a, c, g, or t
  misc_feature (364)..(364): n is a, c, g, or t
  misc_feature (423)..(423): n is a, c, g, or t
  misc_feature (440)..(440): n is a, c, g, or t
  misc_feature (515)..(515): n is a, c, g, or t
tgaaaactctggagccctgataaaatatagcatttttcnnnnntcagagcacaggctgcaaagccntgcattcttttctttgatgagtttgagtccatcgctcctcgaagagncnatgacaacacaggggttacagaccgagtagtcaaccagttgctgacacagttagacggagtagaaggcttacagggnnnntnnntgntnncnnnnannnnnnnncctgacttgatcgaccctgccctgttgcggcctggcagactggataaatgtgtatactgccctcctccagatcaggtgtcccgtcttgagattttaactgtcctcagcaagtctctagctctggcangatnacgtggaccttcangcacgtggcgtcggtcaccgactcgttcactggagcggatctgaaagctctgctgtacnacgctcagctggaggcnttgcagggacggctgctgcccagtgggcttcccgatggaggctccagctctgacagtgacctgagtctgtcttcnatggtctttcttaaccacagcagtg

SEQ ID NO: 3664 - DNA, 540 bp, Mus musculus; identical to SEQ ID NO: 3663
  misc_feature (39)..(43): n is a, c, g, or t
  misc_feature (66)..(66): n is a, c, g, or t
  misc_feature (113)..(113): n is a, c, g, or t
  misc_feature (115)..(115): n is a, c, g, or t
  misc_feature (192)..(195): n is a, c, g, or t
  misc_feature (197)..(199): n is a, c, g, or t
  misc_feature (202)..(202): n is a, c, g, or t
  misc_feature (204)..(205): n is a, c, g, or t
  misc_feature (207)..(210): n is a, c, g, or t
  misc_feature (212)..(219): n is a, c, g, or t
  misc_feature (346)..(346): n is a, c, g, or t
  misc_feature (350)..(350): n is a, c, g, or t
  misc_feature (364)..(364): n is a, c, g, or t
  misc_feature (423)..(423): n is a, c, g, or t
  misc_feature (440)..(440): n is a, c, g, or t
  misc_feature (515)..(515): n is a, c, g, or t

SEQ ID NO: 3665 - DNA, 534 bp, Mus musculus
  misc_feature (211)..(211): n is a, c, g, or t
  misc_feature (216)..(216): n is a, c, g, or t
  misc_feature (283)..(283): n is a, c, g, or t
  misc_feature (319)..(319): n is a, c, g, or t
  misc_feature (325)..(325): n is a, c, g, or t
  misc_feature (329)..(329): n is a, c, g, or t
  misc_feature (345)..(345): n is a, c, g, or t
  misc_feature (348)..(348): n is a, c, g, or t
  misc_feature (363)..(363): n is a, c, g, or t
  misc_feature (463)..(463): n is a, c, g, or t
ttggccctttgctagctgctggctttaggtacacataggataatatgtgtccacgtttctacttggaactggtaaaagttgtcactggctggaaaatggtatctctctcttgtatacaagatggtccattgacactggtactttatgaagcagttctttgtttgtttgattgagctctcttgaaccttgttcatcttttagtttttgcttngaatngaatggaactggtttgaagttaaaggaaatattcattttgaaacttgttcattttgaaaggaaatgncaagtttcaaaatgaaaaataaaatgaaaaaggaantaaatnattntcccagatggtcactnganttttaaaaaatggcngcacacagtaaaactgctaaaaacaaaaacttacctcattattggtttgcatcttttttcagctactaattttataccaaaatgttaaatatttatattntttgagtttcaatcttgtatggaaaaaaataattagtaggtctaaaaatgccatgctttccaataaagaag

SEQ ID NO: 3666 - DNA, 534 bp, Mus musculus; identical to SEQ ID NO: 3665
  misc_feature (211)..(211): n is a, c, g, or t
  misc_feature (216)..(216): n is a, c, g, or t
  misc_feature (283)..(283): n is a, c, g, or t
  misc_feature (319)..(319): n is a, c, g, or t
  misc_feature (325)..(325): n is a, c, g, or t
  misc_feature (329)..(329): n is a, c, g, or t
  misc_feature (345)..(345): n is a, c, g, or t
  misc_feature (348)..(348): n is a, c, g, or t
  misc_feature (363)..(363): n is a, c, g, or t
  misc_feature (463)..(463): n is a, c, g, or t

SEQ ID NO: 3667 - DNA, 404 bp, Mus musculus
tctgaaagggcctgtgcaggacagcagaacttgtattacagatctcaggtggcttttactcagtctcaggtgctgcagaatgaagccatggccatatttaatgtcatattgttactttttaaggggcctatttcctagccttaaattatagactaattttctgctatagaatccagtagcttattttctgtctctgccttttgtttgactttttctttcttttgtggcagttttgggaggtagtatgctctatttgttattttactcccaatcatcctgttctcatgaagttccccctgctttctgcctgttcacctttaagttctccattcagcacctttcccggttatctccatcttaagaagctgcgttgcagagggtcatgactaaagttgcttgctcaa

SEQ ID NO: 3668 - DNA, 404 bp, Mus musculus; identical to SEQ ID NO: 3667

SEQ ID NO: 3669 - DNA, 416 bp, Mus musculus
  misc_feature (168)..(171): n is a, c, g, or t
  misc_feature (173)..(261): n is a, c, g, or t
  misc_feature (276)..(276): n is a, c, g, or t
tgaggcatctggttaaagcttaagctgcttctcttcttcctcttcctcctcctcttcctcctcctcctctccctcttccttctcttcttccttctcctttttatacagacattcctcataatcactcctttgagttattttgctttctgtattaaaaaacatacttcnnnncnnnnnnnnnnnnnnnnnnnnnnnnnnnnnnnnnnnnnnnnnnnnnnnnnnnnnnnnnnnnnnnnnnnnnnnnnnnnnnnnnnnnnnnnntaccaacttttacanctaactttcttaagtcctttcgtctggtatgagtagctagctataacacaaagcatgaattcttatttctcaatcacattagcttctttaatgatgttgataataattgacttttgtagccagagccaggtgtctcaacc

SEQ ID NO: 3670 - DNA, 416 bp, Mus musculus; identical to SEQ ID NO: 3669
  misc_feature (168)..(171): n is a, c, g, or t
  misc_feature (173)..(261): n is a, c, g, or t
  misc_feature (276)..(276): n is a, c, g, or t

SEQ ID NO: 3671 - DNA, 394 bp, Mus musculus
  misc_feature (163)..(163): n is a, c, g, or t
  misc_feature (196)..(196): n is a, c, g, or t
  misc_feature (311)..(311): n is a, c, g, or t
  misc_feature (322)..(322): n is a, c, g, or t
  misc_feature (347)..(347): n is a, c, g, or t
tctgcagttagacaagctaaaaacacgaacattatcctgacctgtttagcacctctctgtttgcattctaattctgtaactacaagtttatgcccagatggtctgtgatgtggaggttcttctgagagttaaaagttaatggataacttgcttttgcagacantgaactgtaaatttatgtgtgctttgtgctttntggtgacatagtgacgtgagggtttgcaggaaaaataatggatttgacgaaaataatgaaaagtcttttgcttatgtattactgtataacaaggaagtgtgtaaccaataaaagnctgaggtgaantcagagaaagaaccttcaagctgtntccgagcacagcttcagaacagcaatgagttgcctgtcagtgtgcac

SEQ ID NO: 3672 - DNA, 394 bp, Mus musculus; identical to SEQ ID NO: 3671
  misc_feature (163)..(163): n is a, c, g, or t
  misc_feature (196)..(196): n is a, c, g, or t
  misc_feature (311)..(311): n is a, c, g, or t
  misc_feature (322)..(322): n is a, c, g, or t
  misc_feature (347)..(347): n is a, c, g, or t

SEQ ID NO: 3673 - DNA, 370 bp, Mus musculus
  misc_feature (78)..(78): n is a, c, g, or t
  misc_feature (143)..(143): n is a, c, g, or t
tccttggagtttctccgtgcggagggctctgtcacgcccaggtcatcgcctaagggccctcccatggcttcccagganagggtggactcggtgaccaaaggaaccgggttccgccgctgccgtaagcaagcaggttacacgcnggggacttgtgagctgctcagagttatgatgaaggagtctaaactgacaaacttccagcaacaccacatcatggacaccatgaaaacgcggcggccataactagttactgtgtatgcacccagggaagaggaggtagagccggagcacaggatcatcctgagaacaagggcatcctctcaggtctgtgaaggaaccctaaccactcttctcatctgttactgcctgg

SEQ ID NO: 3674 - DNA, 370 bp, Mus musculus; identical to SEQ ID NO: 3673
  misc_feature (78)..(78): n is a, c, g, or t
  misc_feature (143)..(143): n is a, c, g, or t

SEQ ID NO: 3675 - DNA, 489 bp, Mus musculus
  misc_feature (294)..(295): n is a, c, g, or t
  misc_feature (301)..(301): n is a, c, g, or t
  misc_feature (326)..(326): n is a, c, g, or t
  misc_feature (339)..(339): n is a, c, g, or t
  misc_feature (365)..(365): n is a, c, g, or t
  misc_feature (368)..(368): n is a, c, g, or t
  misc_feature (380)..(380): n is a, c, g, or t
  misc_feature (386)..(386): n is a, c, g, or t
  misc_feature (409)..(409): n is a, c, g, or t
  misc_feature (426)..(426): n is a, c, g, or t
  misc_feature (438)..(438): n is a, c, g, or t
  misc_feature (442)..(442): n is a, c, g, or t
  misc_feature (462)..(462): n is a, c, g, or t
agcctggcagccagcctctggagctcatctcacataatggcctgcaaatgtcgttatcaggcaccagaaagcagggaactcttgcgacggcttccaaggatactggagactcagacatcatctcatgctaagctgtttgagacaaaccacaagtgatcccagtccttggaagctggaggcaggcgatcagaattccaaggactacacagcaagtttgtgactagcctgagatacaggagacgctggaggcaggcggatcagaattccaaggactacacagcaagctggaggcanncggatnagaattccaaggactacacagcaanctggaggcaggcnatcagaattccaaggactacacagcnagntggaggcaggcnatcagnattccaaggactacacagcaagntggaggcaggcgatcanaattccaaggantacncagcaagtttgagactagcntgagatacaggagacctagtttcagga

SEQ ID NO: 3676 - DNA, 489 bp, Mus musculus; identical to SEQ ID NO: 3675
  misc_feature (294)..(295): n is a, c, g, or t
  misc_feature (301)..(301): n is a, c, g, or t
  misc_feature (326)..(326): n is a, c, g, or t
  misc_feature (339)..(339): n is a, c, g, or t
  misc_feature (365)..(365): n is a, c, g, or t
  misc_feature (368)..(368): n is a, c, g, or t
  misc_feature (380)..(380): n is a, c, g, or t
  misc_feature (386)..(386): n is a, c, g, or t
  misc_feature (409)..(409): n is a, c, g, or t
  misc_feature (426)..(426): n is a, c, g, or t
  misc_feature (438)..(438): n is a, c, g, or t
  misc_feature (442)..(442): n is a, c, g, or t
  misc_feature (462)..(462): n is a, c, g, or t

SEQ ID NO: 3677 - DNA, 230 bp, Mus musculus
tcaagcttcccacagatctgtaagcaagtactctaggaagaagctcctggaaccagcagctgcaaaggagtgctctgggaacttccacaggcattgtatgtggaacctctgggaaaggctgcaggaacagtacagggataaccagatcagaaaggacaatgcaccaccaagaggctccaggatcctccaccaggcccaagacagggcaaggctacaaactgtgctactcc

SEQ ID NO: 3678 - DNA, 230 bp, Mus musculus; identical to SEQ ID NO: 3677

SEQ ID NO: 3679 - DNA, 444 bp, Mus musculus
gcatcgatatgttatcattgcattatcaccaagggcacgcacagcctagcacctgttgcttcagataccgtcacactctgtttccaatttagatacaaccacataataaaatgttagagtcttcaatgggaagcagaggtgcttgttataaagatgggggcttatgcttgtgtcacattttgtgttcttttcttcttttgtttggttttaacttaattgtgacccttgtaacatcatcttgccaaaaaaaaaaaaaaagttgaactggatttatgtagacatgtcaagacgtactatctatttctttgtcagttatagcaataagagtggataaactctaaaatccagatctcccacaatgaacatccgtgttctttctatgatttttctttctttatggtgagccacaattaaacttgagatgtacagccacccaaacccagg

SEQ ID NO: 3680 - DNA, 444 bp, Mus musculus; identical to SEQ ID NO: 3679

SEQ ID NO: 3681 - DNA, 278 bp, Mus musculus
aaatttaaaggggctggtgagatggctcagcggttaagagcactgactgctcttccaaaggtcctgagttcaaattccagcaaccacatggtgactcacaaccatctgtaatgagatctgacctcctcttctggggtgtctgaagacaactacagtgtacttacatataataaataaacaggtttaaaaaaaaatttaaaaatgagcattagaaggaaaaaaaaacttgtgtggatggtgtatgtgtgggtatctgtgcctgtgccactagaatgttt

SEQ ID NO: 3682 - DNA, 278 bp, Mus musculus; identical to SEQ ID NO: 3681

SEQ ID NO: 3683 - DNA, 68 bp, Mus musculus
tattcaaatgctaaatcctgtcgtgggttgctccaagatgagccgttcgatcttcatgtataccagcc

SEQ ID NO: 3684 - DNA, 68 bp, Mus musculus; identical to SEQ ID NO: 3683

SEQ ID NO: 3685 - DNA, 384 bp, Mus musculus
  misc_feature (323)..(323): n is a, c, g, or t
  misc_feature (359)..(359): n is a, c, g, or t
tcagacccaatgctggaggttcggggcagcactttcttgtgagacgcaaaggaaaacaacatggagtgctttctaatttctctctggggtttggttttgtctgtctttgttgtgaaactctggtgtctggtgaagaagtttctcttggggcaggatggagaaggcacaggtgagctgcccaaagattcgcctggggaggatctggagaaagctttggttatgtgtccctgtggagatgctaaaccttgggtccaattctttattttcaaatccacaggtctcttgggtttgctgtccactgctgggaagacttcctctgtaangggatcttcagcttcatcgccttcagaacaggaggncgtcctgggacagagtgaagctgtc

SEQ ID NO: 3686 - DNA, 384 bp, Mus musculus; identical to SEQ ID NO: 3685
  misc_feature (323)..(323): n is a, c, g, or t
  misc_feature (359)..(359): n is a, c, g, or t

SEQ ID NO: 3687 - DNA, 360 bp, Mus musculus
  misc_feature (60)..(61): n is a, c, g, or t
  misc_feature (223)..(224): n is a, c, g, or t
  misc_feature (335)..(335): n is a, c, g, or t
tgtatacacatacctctggctgtactactgtgaccgcaactccagagaccatcaccacanngggaagacccaccttgagttttggtggcaccatcttagtggctagagtcctgcactgagtcaaaaggagaaagcaggttgagccctggctgtatttgtcttgctctgatttctgacacagaagcagtgtgaccagccatcttaagtttttgctgccatgcanncatcagccaacagatagcatcccttcctatgccgaatgttaaaattaagccctcctttcttccagttgttctttagtctggtatttcatttcagcaatgagaatggtatcnagcacaggcatcaagctctctctct

SEQ ID NO: 3688 - DNA, 360 bp, Mus musculus; identical to SEQ ID NO: 3687
  misc_feature (60)..(61): n is a, c, g, or t
  misc_feature (223)..(224): n is a, c, g, or t
  misc_feature (335)..(335): n is a, c, g, or t

SEQ ID NO: 3689 - DNA, 382 bp, Mus musculus
  misc_feature (32)..(32): n is a, c, g, or t
  misc_feature (308)..(343): n is a, c, g, or t
tcaaaaggccgtgctggtgacaggagccatgnggcagaagatcttgaagaacgtgcagtccttgaccttggatctacttggggctggggcttccctcccttgtcatgtgaggctgtggttttcggaccctcccgggcttggtggcagaatcagggcaactttgattttcaccttcatgctctctcgggtcagacacatctgcctttctcagccaccttgactgctccctgctgagtctgtggaacagagatgctttcaggtcctgtgaagagacatagctgtccccaactgcagccatgagatgagcnnnnnnnnnnnnnnnnnnnnnnnnnnnnnnnnnnnntggagaagaactcggctgcctaagccaaaaggctcttgt

SEQ ID NO: 3690 - DNA, 382 bp, Mus musculus; identical to SEQ ID NO: 3689
  misc_feature (32)..(32): n is a, c, g, or t
  misc_feature (308)..(343): n is a, c, g, or t

SEQ ID NO: 3691 - DNA, 381 bp, Mus musculus
  misc_feature (81)..(81): n is a, c, g, or t
  misc_feature (216)..(216): n is a, c, g, or t
gatacggagaactccagacaccccaccatttcagggctccccttgtcaagggatcttccctcgaggtggggccctaatggncagattagctctttctaaatccaagccagggtgactacaatgtccaccttgatgtcctccctctatccagtgacattttgtaaacagcaggtgatgtcccctttacaatctagaccatctctggcttccagattnccaccccttgctccccaggtctctgggtgtccctgccaggtactgacgtgagtcaccagaatgtagatctggtccagccctggaagcccaatccactgaactgtggttgtggcctccaggggcatcctggtctcctcacggttcccagcgccaagattctcagag

SEQ ID NO: 3692 - DNA, 381 bp, Mus musculus; identical to SEQ ID NO: 3691
  misc_feature (81)..(81): n is a, c, g, or t
  misc_feature (216)..(216): n is a, c, g, or t

SEQ ID NO: 3693 - DNA, 421 bp, Mus musculus
  misc_feature (90)..(90): n is a, c, g, or t
  misc_feature (108)..(108): n is a, c, g, or t
  misc_feature (367)..(367): n is a, c, g, or t
  misc_feature (379)..(379): n is a, c, g, or t
  misc_feature (396)..(396): n is a, c, g, or t
tcttggagtgtctggttgccgtagtgtgacacggaagagaaggtggctggtctgttctcctggatagtctgcatgggtgactgacgcaangagttcagagacgaaggntccaaacacggtactgttgaaggagccggttggggagcccaggccggagctcttggcggtatatgggaagctggagccccgctgcataagcccgccaggaggcgatggctgcgatggcgggagcgcgatgttatccagcaggtcgtccatgaggttctcggccagcccatcattcagattcatggtgccggccatgtccgtcagccgcggaagctccacagtacacggcttgctcacggagggcgacaggctggcaganctgctgtacagnatgggggacaggggtcnatcatcatcctggacgtcatccagc

SEQ ID NO: 3694 - DNA, 421 bp, Mus musculus; identical to SEQ ID NO: 3693
  misc_feature (90)..(90): n is a, c, g, or t
  misc_feature (108)..(108): n is a, c, g, or t
  misc_feature (367)..(367): n is a, c, g, or t
  misc_feature (379)..(379): n is a, c, g, or t
  misc_feature (396)..(396): n is a, c, g, or t

SEQ ID NO: 3695 - DNA, 73 bp, Mus musculus
caatttcccgacgtgagcgaggatcacgtctctgccctcttggacctgcgcggagacgtgtcccgagagcatc

SEQ ID NO: 3696 - DNA, 309 bp, Mus musculus
ttcggcaggatgctgcccagctcaaagagcttttccttggtttgggcctggaagagagcgctcactgcgcgcccgtcctgctcgcgctgagggaactgctcaacctccacgaccccacactgcttggcctcgaggtggcaggcttgaggcagcaatttcccgacgtgagcgaggatcacgtctctgccctcttggacctgcgcggagacgtgtcccgagagcatcgtcaggcagcactcagttcgctgcaggcgggtccaccgccctcaccgtccactggccgccgggcgctcttcagcctggtaccga

SEQ ID NO: 3697 - DNA, 394 bp, Mus musculus
ccctcgcgccggtggctattgagttatgagttgctagatggtgtgtgtgagcagacgtcgcacttctgccaggacttctggcgcgtacggaagcctggtgttcagctgctgctggcagaggcggaacgaaccgtggtgttacaatacctaagggctctgatgcagggccgcctagtgtgccgcggtacggacgagcggagccaggcggctgagcgacttcggcaggatgctgcccagctcaaagagcttttccttggtttgggcctggaagagagcgctcactgcgcgcccgtcctgctcgcgctgagggaactgctcaacctccacgaccccacactgcttggcctcgaggtggcaggcttgaggcagcaatttcccgacgtgtcccgagagc

SEQ ID NO: 3698 - DNA, 308 bp, Mus musculus
tgaaggcatatgcatcctcagatagtactcaagaaatggagatcaatgagtatttgagctaatttgataccaatcaggatacaaaaatcagtctctggtcaaatttttatctgtatgtgggccatttaaaaaacaaacaaaatgaaacaaaaacatgttaaaaatcagatcatggttctggaacccttgttattatttgagaagaaaggaaggtccctcagatgtgtgtgtgtctgttcacatgtgcaggaatggcttgtttggtctttatcctttgtatcaaagttgctgcttctttcccctttatg

SEQ ID NO: 3699 - DNA, 308 bp, Mus musculus; identical to SEQ ID NO: 3698

SEQ ID NO: 3700 - DNA, 539 bp, Mus musculus
  misc_feature (193)..(194): n is a, c, g, or t
  misc_feature (196)..(204): n is a, c, g, or t
ggtatagcctttcctatataccgtatgcaagggatgccgtgaagaagtgctttgctgtgtgtcttgcataacacactgccagtgtgcagggagcaccgtggacggaagctggtggacaattctgtaaatgtcctctaaacctctgtctcacagacacgtgccttctgcttgcagcggtgtgtggcttgcaatnngnnnnnnnnngagggttgcctgtgggaatagtcatgagtcctagaccctaatgtctgtaacacaatccgaggctctgtggcttgtgtagacaactcttcttgtgaccattaacctctgggaggtattccactgacttctcacagagcagctttgtctggtagcagcagatcagcctcaggagcaactgattcccaggtggcagcaggaaggtctagcagggcttctagcggagcagcaggaagtacagaattttgaagatttgcccctcaccaggaaaaccattgccacagtccctgcacagcgtcttccctgctgtttgagaacaagtgattctgcccagaccc

SEQ ID NO: 3701 - DNA, 539 bp, Mus musculus; identical to SEQ ID NO: 3700
  misc_feature (193)..(194): n is a, c, g, or t
  misc_feature (196)..(204): n is a, c, g, or t

SEQ ID NO: 3702 - DNA, 443 bp, Mus musculus
  misc_feature (242)..(244): n is a, c, g, or t
  misc_feature (266)..(266): n is a, c, g, or t
  misc_feature (282)..(282): n is a, c, g, or t
  misc_feature (285)..(285): n is a, c, g, or t
  misc_feature (340)..(340): n is a, c, g, or t
  misc_feature (342)..(342): n is a, c, g, or t
  misc_feature (344)..(344): n is a, c, g, or t
  misc_feature (346)..(346): n is a, c, g, or t
  misc_feature (392)..(392): n is a, c, g, or t
  misc_feature (406)..(406): n is a, c, g, or t
  misc_feature (411)..(411): n is a, c, g, or t
tcgtcgccctttttgtactgttgaaaccacttcattggacagttgcaatagcaaaatccccagttagattagtgtttacacattttatttctgttatttaatatttaatgttttcctttatagtcaagtgatgtttgtctctagtgttctaatgtagcacaatcctatgtaaaatcatactatgtatttttgacattattgttgaaattgaaatatatgcataagtctttaattttgtgtgnnntgttttaagtgctattcatttnagctactgaaaatganaangaaatgttgggcttctttaagattaatgcactatgcaagcatgtatgctttttanancncnccaggttaggttttatagcactcgcccagggtctgtccccaggggntccgacaaagctgntcccntcctcctggcaagcgctgagctacctgcccat

SEQ ID NO: 3703 - DNA, 443 bp, Mus musculus; identical to SEQ ID NO: 3702
  misc_feature (242)..(244): n is a, c, g, or t
  misc_feature (266)..(266): n is a, c, g, or t
  misc_feature (282)..(282): n is a, c, g, or t
  misc_feature (285)..(285): n is a, c, g, or t
  misc_feature (340)..(340): n is a, c, g, or t
  misc_feature (342)..(342): n is a, c, g, or t
  misc_feature (344)..(344): n is a, c, g, or t
  misc_feature (346)..(346): n is a, c, g, or t
  misc_feature (392)..(392): n is a, c, g, or t
  misc_feature (406)..(406): n is a, c, g, or t
  misc_feature (411)..(411): n is a, c, g, or t

SEQ ID NO: 3704 - DNA, 335 bp, Mus musculus
tcagccagactgaggctctccggagtgggaaactgagtcaccttccaaggaaggatcttgtgcccgtaggcaccctgaaatcgttcctggataatgaatcttccccaacgtaaatgtgtgctaccttcaagacaggaagaggagggggagtcgggtggggggcatggccccacccctgagacctagggatacacagatgaccttgagaaagaagccagtgaaggacacaagctctacactgcagcattgaagatccagagccaagaggaggaaatgagtgctcagcgaaacacttgcagccagcccatcacagaaacatgtttccatcttgtttg

SEQ ID NO: 3705 - DNA, 335 bp, Mus musculus; identical to SEQ ID NO: 3704

SEQ ID NO: 3706 - DNA, 530 bp, Mus musculus
  misc_feature (84)..(84): n is a, c, g, or t
  misc_feature (244)..(244): n is a, c, g, or t
  misc_feature (461)..(461): n is a, c, g, or t
  misc_feature (492)..(492): n is a, c, g, or t
  misc_feature (494)..(494): n is a, c, g, or t
  misc_feature (505)..(505): n is a, c, g, or t
ggcccttatatttgtcacacttaagtgcctgcttagggaaggtattgtgaaaagtattagaaattttgagatcagtatctgttntatgatcagaaaaaaaatgctcttttgtacatttgtgacagttatgcagaggactgtccaagcaagctaatcacagaactgtaaatagagggcagttgtttgcaatgagtttttccttaagtaagtgtaatttttctttttctttttttctttttttttnaaaaatatcctgaggttctcatttagcgtggctgttgagaggattttgaatacagtgatgtagctgctagcgacgaagggtctgtttttcttgtatatacatgataacttgcagttgccctgcctttcccctccccctccctcttcagtctgttgagagcatggccacaggtcaagggaatctttaccattggagttatgtacataaaaaaaaaaanccatgaacatttggacatttcagattatatnanaaacaatctgnactgctctgggatcctttggtctta

SEQ ID NO: 3707 - DNA, 530 bp, Mus musculus; identical to SEQ ID NO: 3706
  misc_feature (84)..(84): n is a, c, g, or t
  misc_feature (244)..(244): n is a, c, g, or t
  misc_feature (461)..(461): n is a, c, g, or t
  misc_feature (492)..(492): n is a, c, g, or t
  misc_feature (494)..(494): n is a, c, g, or t
  misc_feature (505)..(505): n is a, c, g, or t

SEQ ID NO: 3708 - DNA, 283 bp, Mus musculus
gaaactagaacctgagaaccttgggggccgacatgcagcttacgatgctgctctttcttcagaaattgttactaaatctgtggcctattgattcctcaaagaaattgtattaatttcgattgaaatttcttagcctcagcactattttaaaatttaatctggatgatgataattactccattgcttgcttgtatttttttctgtagtgctggggattaggtgagggccttgtgcattctaggccttgtaaatgttacctatgccccagcagctcattgctttc

SEQ ID NO: 3709 - DNA, 283 bp, Mus musculus; identical to SEQ ID NO: 3708

SEQ ID NO: 3710 - DNA, 532 bp, Mus musculus
  misc_feature (31)..(32): n is a, c, g, or t
  misc_feature (39)..(39): n is a, c, g, or t
  misc_feature (46)..(46): n is a, c, g, or t
  misc_feature (60)..(60): n is a, c, g, or t
  misc_feature (69)..(69): n is a, c, g, or t
  misc_feature (80)..(80): n is a, c, g, or t
  misc_feature (99)..(99): n is a, c, g, or t
  misc_feature (104)..(104): n is a, c, g, or t
  misc_feature (106)..(106): n is a, c, g, or t
  misc_feature (113)..(113): n is a, c, g, or t
  misc_feature (115)..(115): n is a, c, g, or t
  misc_feature (118)..(118): n is a, c, g, or t
  misc_feature (121)..(121): n is a, c, g, or t
  misc_feature (150)..(150): n is a, c, g, or t
  misc_feature (167)..(167): n is a, c, g, or t
  misc_feature (324)..(324): n is a, c, g, or t
  misc_feature (328)..(328): n is a, c, g, or t
  misc_feature (335)..(335): n is a, c, g, or t
  misc_feature (367)..(367): n is a, c, g, or t
  misc_feature (382)..(382): n is a, c, g, or t
  misc_feature (385)..(385): n is a, c, g, or t
  misc_feature (394)..(394): n is a, c, g, or t
  misc_feature (396)..(396): n is a, c, g, or t
  misc_feature (409)..(449): n is a, c, g, or t
gtctcctactacaagaagataatagaaggcnncgaggtngtccagnaaattcagaataancagaaggtnggaccgagtgnatgatacccctcggagggncccgnangtctctncntgnggnacatcatgacatcatcacagacattgccnaccttccagaccactcngggcttcattgtgactgcttctagagacggaattgtgaaggtgtggaaataagtcctgccgacttgtataaaatgctgtaaaattcgaaatgtaccatagctcaggacacgaaggacttctagagaacaaacgtgggttttgaagtgactgttactntttnatggctnagcaaatcccagccacagtggggaaggatgtnggcatggtgactttnttnatgtgcatntntgaagaactggcnnnnnnnnnnnnnnnnnnnnnnnnnnnnnnnnnnnnnnnnnaacaggtgagaagtgtaaaaagggaagatgacccggccagtttattttctatggaaatgattgtaagccgttatgtaaacaca

SEQ ID NO: 3711 - DNA, 532 bp, Mus musculus; identical to SEQ ID NO: 3710
  misc_feature (31)..(32): n is a, c, g, or t
  misc_feature (39)..(39): n is a, c, g, or t
  misc_feature (46)..(46): n is a, c, g, or t
  misc_feature (60)..(60): n is a, c, g, or t
  misc_feature (69)..(69): n is a, c, g, or t
  misc_feature (80)..(80): n is a, c, g, or t
  misc_feature (99)..(99): n is a, c, g, or t
  misc_feature (104)..(104): n is a, c, g, or t
  misc_feature (106)..(106): n is a, c, g, or t
  misc_feature (113)..(113): n is a, c, g, or t
  misc_feature (115)..(115): n is a, c, g, or t
  misc_feature (118)..(118): n is a, c, g, or t
  misc_feature (121)..(121): n is a, c, g, or t
  misc_feature (150)..(150): n is a, c, g, or t
  misc_feature (167)..(167): n is a, c, g, or t
  misc_feature (324)..(324): n is a, c, g, or t
  misc_feature (328)..(328): n is a, c, g, or t
  misc_feature (335)..(335): n is a, c, g, or t
  misc_feature (367)..(367): n is a, c, g, or t
  misc_feature (382)..(382): n is a, c, g, or t
  misc_feature (385)..(385): n is a, c, g, or t
  misc_feature (394)..(394): n is a, c, g, or t
  misc_feature (396)..(396): n is a, c, g, or t
  misc_feature (409)..(449): n is a, c, g, or t

SEQ ID NO: 3712 - DNA, 564 bp, Mus musculus
  misc_feature (43)..(71): n is a, c, g, or t
  misc_feature (102)..(102): n is a, c, g, or t
  misc_feature (108)..(108): n is a, c, g, or t
  misc_feature (232)..(250): n is a, c, g, or t
  misc_feature (256)..(276): n is a, c, g, or t
cggagcacaatgtcttggttgtggagggagctcgaaagtatgnnnnnnnnnnnnnnnnnnnnnnnnnnnnnactctgacggattgcaagaaacacatccggntccacncaggagaaaagccgtacgcctgcctcaagtgtggcaaacggttcagtcagtccagccacctatataaacactcgaaaacgacctgcctgcgctggcagagcagcaacctccccagcaccctgcnnnnnnnnnnnnnnnnnnnagcgcnnnnnnnnnnnnnnnnnnnnnctaaaaccgctgtaggcaggcagctcttgtcactggactcggtctcactgtccagtggctctcatgaatttcagccaagagtaagcagagaactgttaggtgtagcacttaccctgcacatttcttagggtggaggaatgcagtcctaaagtaggttgtcattgttgttaagaatatcaaatttaaaaatgaaagtgcagaaaacattttaacactattttaaagctctgtgaagcatttaattaaatgtcctgtatcctgtgatgggagtattccatccctgtacag

SEQ ID NO: 3713 - DNA, 564 bp, Mus musculus; identical to SEQ ID NO: 3712
  misc_feature (43)..(71): n is a, c, g, or t
  misc_feature (102)..(102): n is a, c, g, or t
  misc_feature (108)..(108): n is a, c, g, or t
  misc_feature (232)..(250): n is a, c, g, or t
  misc_feature (256)..(276): n is a, c, g, or t

SEQ ID NO: 3714 - DNA, 434 bp, Mus musculus
  misc_feature (26)..(26): n is a, c, g, or t
  misc_feature (160)..(235): n is a, c, g, or t
accctggtccttagcagggctcctgntgctctgaacacaggcttgtggggacagctaaatacctgtgatactaaggaggccgcttcctgccgctgagttagcaactggtcccagaatagcaagagtggggtcctttagcttgcatagcattctgttcttnnnnnnnnnnnnnnnnnnnnnnnnnnnnnnnnnnnnnnnnnnnnnnnnnnnnnnnnnnnnnnnnnnnnnnnnnnnntactggctgagtccactaagccactgttttccgcagtggagtcaagggcagctcagttagagcacttcctccacagtctgtctttgagttggggagacggtcttggagcagcccaaggaacccctttgctaggttgcaccaggttcttttctctgcacatatttggctcacaatgtcttcatgggttgaacaataactg

SEQ ID NO: 3715 - DNA, 434 bp, Mus musculus; identical to SEQ ID NO: 3714
  misc_feature (26)..(26): n is a, c, g, or t
  misc_feature (160)..(235): n is a, c, g, or t

SEQ ID NO: 3716 - DNA, 586 bp, Mus musculus
  misc_feature (28)..(28): n is a, c, g, or t
  misc_feature (216)..(216): n is a, c, g, or t
  misc_feature (251)..(285): n is a, c, g, or t
  misc_feature (460)..(460): n is a, c, g, or t
  misc_feature (486)..(486): n is a, c, g, or t
ggaacttaacacacggagtagcagagantcttggttgccaggtaggaaagtgtagttgtgtaagaaccgggcttcccaaaaacttaattcctagtaattaaagggtttgccttttgggctgtccaaaaaagaagaatgataattagatcctgggtgaaagcttcccaacaaggaaaggctcatatttggggtaagaagggttaattgttcccagantccaacctagaggaaattgtgagacttcagtaccnnnnnnnnnnnnnnnnnnnnnnnnnnnnnnnnnnntgttttaatcagttgcctttttttaaaagacattttttatgtaaagcaaattgaactgtcatcagaaatgaagttacattgttgggaccatttctttaaagatttcacagaagttagcctttggcatttgacaggacatacaccctaggtaacaaacagcacataccaatttctntacaccaagaacttctaatacattgnaaaaaagaaaaaagaaagctgggttccaaatggatagtattcttaaagaactaaagtcagcatttttagaggtaacagcagccaagaaatgcagcagcaa

SEQ ID NO: 3717 - DNA, 586 bp, Mus musculus; identical to SEQ ID NO: 3716
  misc_feature (28)..(28): n is a, c, g, or t
  misc_feature (216)..(216): n is a, c, g, or t
  misc_feature (251)..(285): n is a, c, g, or t
  misc_feature (460)..(460): n is a, c, g, or t
  misc_feature (486)..(486): n is a, c, g, or t

SEQ ID NO: 3718 - DNA, 248 bp, Mus musculus
  misc_feature (38)..(43): n is a, c, g, or t
  misc_feature (45)..(45): n is a, c, g, or t
  misc_feature (47)..(53): n is a, c, g, or t
  misc_feature (55)..(56): n is a, c, g, or t
  misc_feature (59)..(59): n is a, c, g, or t
  misc_feature (63)..(64): n is a, c, g, or t
  misc_feature (76)..(76): n is a, c, g, or t
  misc_feature (94)..(95): n is a, c, g, or t
  misc_feature (105)..(105): n is a, c, g, or t
  misc_feature (116)..(116): n is a, c, g, or t
  misc_feature (125)..(125): n is a, c, g, or t
  misc_feature (166)..(166): n is a, c, g, or t
  misc_feature (198)..(198): n is a, c, g, or t
cccaggcaagaagtggcctctcactcaaattcctgttnnnnnntncnnnnnnnanncanaaannacaatcatctcnggaaaaggggttcccctnncatcatatcngtccaggctanggatttggnccttctaggttctactggtccaccaagtatagagagatccntggggcctgcagttttccctccctcttcagangggatctcttggcaacagaggtagcatgaggcatgctctgcttactttta

SEQ ID NO: 3719 - DNA, 248 bp, Mus musculus; identical to SEQ ID NO: 3718
  misc_feature (38)..(43): n is a, c, g, or t
  misc_feature (45)..(45): n is a, c, g, or t
  misc_feature (47)..(53): n is a, c, g, or t
  misc_feature (55)..(56): n is a, c, g, or t
  misc_feature (59)..(59): n is a, c, g, or t
  misc_feature (63)..(64): n is a, c, g, or t
  misc_feature (76)..(76): n is a, c, g, or t
  misc_feature (94)..(95): n is a, c, g, or t
  misc_feature (105)..(105): n is a, c, g, or t
  misc_feature (116)..(116): n is a, c, g, or t
  misc_feature (125)..(125): n is a, c, g, or t
  misc_feature (166)..(166): n is a, c, g, or t
  misc_feature (198)..(198): n is a, c, g, or t

SEQ ID NO: 3720 - DNA, 393 bp, Mus musculus
  misc_feature (46)..(46): n is a, c, g, or t
  misc_feature (49)..(96): n is a, c, g, or t
  misc_feature (121)..(121): n is a, c, g, or t
  misc_feature (126)..(126): n is a, c, g, or t
  misc_feature (133)..(148): n is a, c, g, or t
  misc_feature (294)..(294): n is a, c, g, or t
  misc_feature (299)..(300): n is a, c, g, or t
  misc_feature (302)..(302): n is a, c, g, or t
  misc_feature (313)..(313): n is a, c, g, or t
  misc_feature (318)..(318): n is a, c, g, or t
  misc_feature (360)..(360): n is a, c, g, or t
ggcaagaatttcattccccaacaggtactgatcccagaacccctgntannnnnnnnnnnnnnnnnnnnnnnnnnnnnnnnnnnnnnnnnnnnnnnncctgccttgaaatagcacataatgncagtntccggtnnnnnnnnnnnnnnnngtatttacattgatacaaaaaaattttttcttttttaaatgttccatgcttttgaaatataaatagagtgtcctctcccagacactcccaggggagctcagccagcaaaggacacagctgtgtaccatgctttcctaacaagcagnacacnnanttccatctaanaccantcatacacacacagatcacacacagatcacacacatacagtnatcataatagcaagttttcttaagctacgggat

SEQ ID NO: 3721 - DNA, 393 bp, Mus musculus; identical to SEQ ID NO: 3720
  misc_feature (46)..(46): n is a, c, g, or t
  misc_feature (49)..(96): n is a, c, g, or t
  misc_feature (121)..(121): n is a, c, g, or t
  misc_feature (126)..(126): n is a, c, g, or t
  misc_feature (133)..(148): n is a, c, g, or t
  misc_feature (294)..(294): n is a, c, g, or t
  misc_feature (299)..(300): n is a, c, g, or t
  misc_feature (302)..(302): n is a, c, g, or t
  misc_feature (313)..(313): n is a, c, g, or t
  misc_feature (318)..(318): n is a, c, g, or t
  misc_feature (360)..(360): n is a, c, g, or t

SEQ ID NO: 3722 - DNA, 355 bp, Mus musculus
  misc_feature (296)..(311): n is a, c, g, or t
aggagtgcttcacagcagtcctgcttagtaccgttgaagagactcagtttaccttagtgccttagaggatgctaggtcctctgactgacattcctcagtggtcctcacaggtggttataggggggctgcctctcacctccgagcactacattgtggctgtcccctgcccgcctgcccgccttctgtcctggatcaggaagatggtagcctgctgttagtagcttcacagggcttttatgtttaacttattcccaggggccgtcccaccctgctgtgcctgcacagttcccagtgcnnnnnnnnnnnnnnnntggggacagtgtggccctgtcccagtagcttgatgactcagggt

SEQ ID NO: 3723 - DNA, 355 bp, Mus musculus; identical to SEQ ID NO: 3722
  misc_feature (296)..(311): n is a, c, g, or t

SEQ ID NO: 3724 - DNA, 493 bp, Mus musculus
  misc_feature (43)..(43): n is a, c, g, or t
  misc_feature (46)..(46): n is a, c, g, or t
  misc_feature (212)..(212): n is a, c, g, or t
  misc_feature (246)..(246): n is a, c, g, or t
  misc_feature (256)..(258): n is a, c, g, or t
  misc_feature (261)..(262): n is a, c, g, or t
  misc_feature (267)..(267): n is a, c, g, or t
  misc_feature (272)..(272): n is a, c, g, or t
  misc_feature (275)..(275): n is a, c, g, or t
  misc_feature (277)..(277): n is a, c, g, or t
  misc_feature (280)..(280): n is a, c, g, or t
  misc_feature (297)..(297): n is a, c, g, or t
  misc_feature (304)..(323): n is a, c, g, or t
  misc_feature (326)..(326): n is a, c, g, or t
  misc_feature (328)..(328): n is a, c, g, or t
  misc_feature (331)..(331): n is a, c, g, or t
  misc_feature (387)..(387): n is a, c, g, or t
  misc_feature (414)..(414): n is a, c, g, or t
  misc_feature (452)..(452): n is a, c, g, or t
aggagcttaggctgtcctgcactgcttctcctgggcctctggntgnggacagaagacccgtgtcccattcagggtggcttagacactgtcttaggttactgacgttgccttctttgtttgtccttctgtgctgctgggccaactgtccctggaatgaatgatcagatagatgtttctggaaagggagtccttactctaaagtgccatcggcntagaagccttagcagaaaccaccttgtcaaggcnccttgcaggnnnganntcagnccccnccntnttntgcttccggatcctatntttggtnnnnnnnnnnnnnnnnnnnnatntnttnattatcaaaggcattttaatggagaaaaacagtaaacctggaagatgagggagctnttcagaggagcccctagtgagtgtatntggaccagttggactatttgcagtcaaggcttagagtntgcattgggggttaaatgccaagaggcagtgccaggagaaa

SEQ ID NO: 3725 - DNA, 493 bp, Mus musculus; identical to SEQ ID NO: 3724
  misc_feature (43)..(43): n is a, c, g, or t
  misc_feature (46)..(46): n is a, c, g, or t
  misc_feature (212)..(212): n is a, c, g, or t
  misc_feature (246)..(246): n is a, c, g, or t
  misc_feature (256)..(258): n is a, c, g, or t
  misc_feature (261)..(262): n is a, c, g, or t
  misc_feature (267)..(267): n is a, c, g, or t
  misc_feature (272)..(272): n is a, c, g, or t
  misc_feature (275)..(275): n is a, c, g, or t
  misc_feature (277)..(277): n is a, c, g, or t
  misc_feature (280)..(280): n is a, c, g, or t
  misc_feature (297)..(297): n is a, c, g, or t
  misc_feature (304)..(323): n is a, c, g, or t
  misc_feature (326)..(326): n is a, c, g, or t
  misc_feature (328)..(328): n is a, c, g, or t
  misc_feature (331)..(331): n is a, c, g, or t
  misc_feature (387)..(387): n is a, c, g, or t
  misc_feature (414)..(414): n is a, c, g, or t
  misc_feature (452)..(452): n is a, c, g, or t

SEQ ID NO: 3726 - DNA, 495 bp, Mus musculus
  misc_feature (132)..(132): n is a, c, g, or t
  misc_feature (224)..(224): n is a, c, g, or t
  misc_feature (228)..(228): n is a, c, g, or t
  misc_feature (313)..(314): n is a, c, g, or t
  misc_feature (326)..(326): n is a, c, g, or t
  misc_feature (363)..(470): n is a, c, g, or t
cagacccagaagaggccggccctttcactgaccaaagaaatgtgcccacgagcaactagacgctgtgcttctccccatggattctcacaagggcatcacacccaggctccgtgtagatgtgtgtgcatggtnctggtggtctgactggcccactacccacctggagaagtccctggccctgggtgctttttccaagtggctgcccctttctctcccctcccccncccncccttaaatcttgtcttctcccctgctgatgatcaggcatcatttcagatattggaaaggcctccatgaagtgaaaagttcaccnnctactggaaacnggacattatcatgctgtaagaatggcttgggttagcnnnnnnnnnnnnnnnnnnnnnnnnnnnnnnnnnnnnnnnnnnnnnnnnnnnnnnnnnnnnnnnnnnnnnnnnnnnnnnnnnnnnnnnnnnnnnnnnnnnnnnnnnnnngagtcacctgatgactgctgagtgg

SEQ ID NO: 3727 - DNA, 495 bp, Mus musculus; identical to SEQ ID NO: 3726
  misc_feature (132)..(132): n is a, c, g, or t
  misc_feature (224)..(224): n is a, c, g, or t
  misc_feature (228)..(228): n is a, c, g, or t
  misc_feature (313)..(314): n is a, c, g, or t
  misc_feature (326)..(326): n is a, c, g, or t
  misc_feature (363)..(470): n is a, c, g, or t

SEQ ID NO: 3728 - DNA, 475 bp, Mus musculus
  misc_feature (104)..(104): n is a, c, g, or t
  misc_feature (106)..(106): n is a, c, g, or t
  misc_feature (109)..(109): n is a, c, g, or t
  misc_feature (123)..(123): n is a, c, g, or t
  misc_feature (126)..(126): n is a, c, g, or t
  misc_feature (128)..(128): n is a, c, g, or t
  misc_feature (132)..(132): n is a, c, g, or t
  misc_feature (137)..(137): n is a, c, g, or t
  misc_feature (146)..(147): n is a, c, g, or t
  misc_feature (149)..(149): n is a, c, g, or t
  misc_feature (154)..(154): n is a, c, g, or t
  misc_feature (192)..(192): n is a, c, g, or t
  misc_feature (218)..(218): n is a, c, g, or t
  misc_feature (223)..(223): n is a, c, g, or t
ttttgctgcatatgcatttgctccggccacattagtgactccactaggtgcgctcacgtcctcgtaagtgccattctgtcttcatacttcctaaatgaaagacntnatnttcatgggaaaatnggntntttnctaantattctagnntntacanttatggtcattcatgctccaaaggaagaggagattganaccttaaatgaaatgtcacataagtnaggtnatccaggttttgtggtctttgcaacatttgtggtcattgtggccttgatattcatctttgtggtgggacctcgacatggacagacaaacattcttgtgtatataacaatctgctctgtgattggagcattttcagtctcctgtgtgaagggtttgggtatcgccataaaagagttgttggctggaaagcctgttctgcagcaccccctcgcctggattcttctgtttagccttgtggtctgtgtgagcacac

SEQ ID NO: 3729 - DNA, 475 bp, Mus musculus; identical to SEQ ID NO: 3728
  misc_feature (104)..(104): n is a, c, g, or t
  misc_feature (106)..(106): n is a, c, g, or t
  misc_feature (109)..(109): n is a, c, g, or t
  misc_feature (123)..(123): n is a, c, g, or t
  misc_feature (126)..(126): n is a, c, g, or t
  misc_feature (128)..(128): n is a, c, g, or t
  misc_feature (132)..(132): n is a, c, g, or t
  misc_feature (137)..(137): n is a, c, g, or t
  misc_feature (146)..(147): n is a, c, g, or t
  misc_feature (149)..(149): n is a, c, g, or t
  misc_feature (154)..(154): n is a, c, g, or t
  misc_feature (192)..(192): n is a, c, g, or t
  misc_feature (218)..(218): n is a, c, g, or t
  misc_feature (223)..(223): n is a, c, g, or t

SEQ ID NO: 3730 - DNA, 544 bp, Mus musculus
  misc_feature (55)..(55): n is a, c, g, or t
  misc_feature (60)..(62): n is a, c, g, or t
  misc_feature (72)..(72): n is a, c, g, or t
  misc_feature (77)..(77): n is a, c, g, or t
  misc_feature (79)..(79): n is a, c, g, or t
  misc_feature (91)..(91): n is a, c, g, or t
  misc_feature (93)..(93): n is a, c, g, or t
  misc_feature (110)..(110): n is a, c, g, or t
  misc_feature (121)..(121): n is a, c, g, or t
  misc_feature (123)..(124): n is a, c, g, or t
  misc_feature (128)..(128): n is a, c, g, or t
  misc_feature (136)..(136): n is a, c, g, or t
  misc_feature (146)..(147): n is a, c, g, or t
  misc_feature (163)..(163): n is a, c, g, or t
  misc_feature (195)..(210): n is a, c, g, or t
  misc_feature (243)..(243): n is a, c, g, or t
  misc_feature (245)..(245): n is a, c, g, or t
  misc_feature (380)..(380): n is a, c, g, or t
  misc_feature (445)..(459): n is a, c, g, or t
gacgatcaggtaaacctcctcaccaagcagttgtaaaaccctaaactccagaccntgatnnnctttcttccnatttntntgcactattcangnatctagagagagaaccntgacaggagtncnncctnagtgacanccacagtggnnttatggaggaagaacnttaatgctaacagtgcagcctataaaagtgcnnnnnnnnnnnnnnnntcccctgtaagaaatgttagcgttccatagaantnttctcacagatttttggcaagtttcaactgtccctgttttcctaagtatagatgtacacaattgaagttactgcttattgatttttgattcagattttaatgaatatttaaataaaatccctttcaaagaaaaanatctgacttgattcagattttaatgaatattcaaataaaatccctctcgggggaaaaaaaggtcnnnnnnnnnnnnnnncccaaatactgaagacatcaatagtccattcactgtaaggacagggcagtgacaccaaatggctaagcagtctgccgagcatgcg

SEQ ID NO: 3731 - DNA, 544 bp, Mus musculus; identical to SEQ ID NO: 3730
  misc_feature (55)..(55): n is a, c, g, or t
  misc_feature (60)..(62): n is a, c, g, or t
  misc_feature (72)..(72): n is a, c, g, or t
  misc_feature (77)..(77): n is a, c, g, or t
  misc_feature (79)..(79): n is a, c, g, or t
  misc_feature (91)..(91): n is a, c, g, or t
  misc_feature (93)..(93): n is a, c, g, or t
  misc_feature (110)..(110): n is a, c, g, or t
  misc_feature (121)..(121): n is a, c, g, or t
  misc_feature (123)..(124): n is a, c, g, or t
  misc_feature (128)..(128): n is a, c, g, or t
  misc_feature (136)..(136): n is a, c, g, or t
  misc_feature (146)..(147): n is a, c, g, or t
  misc_feature (163)..(163): n is a, c, g, or t
  misc_feature (195)..(210): n is a, c, g, or t
  misc_feature (243)..(243): n is a, c, g, or t
  misc_feature (245)..(245): n is a, c, g, or t
  misc_feature (380)..(380): n is a, c, g, or t
  misc_feature (445)..(459): n is a, c, g, or t

SEQ ID NO: 3732 - DNA, 493 bp, Mus musculus
  misc_feature (139)..(139): n is a, c, g, or t
  misc_feature (191)..(191): n is a, c, g, or t
gattaagtagggtccctggctagcgggggtaacctgaacaaccttcctccgctggccgctagccaatagacacctggcttccgcggatgagccctttgagtttgtggaggtgttcctcaggtccccagggccctgcccngttgcctgcagatgtgtggacagacaaaacattggactcgttttccaaccanttcaccccttccttcgctagtcctccggtggacgatgggatgcctcattgacttgtttgtggctgtgcatgccagagcttcctagcagacagctcagggctccatcgttcctaaatcccactgtgtaacgaaaaaaaaaaaaacaaaaacaacaacaacaacaacaacaaaaacaaaaccagaaatgaggacaggcccagctggcttggcactgaacttggccacctggagctttggctacccactacaagatgtcagcaagtctcaggatagaagaggcctaaggcagtcctggaagatac

SEQ ID NO: 3733 - DNA, 493 bp, Mus musculus; identical to SEQ ID NO: 3732
  misc_feature (139)..(139): n is a, c, g, or t
  misc_feature (191)..(191): n is a, c, g, or t

SEQ ID NO: 3734 - DNA, 351 bp, Mus musculus
  misc_feature (61)..(64): n is a, c, g, or t
  misc_feature (88)..(107): n is a, c, g, or t
  misc_feature (173)..(175): n is a, c, g, or t
acgatggcttcctggcccaactctgccagctcaatgacagactagccaaggagggcaaggnnnntgaaactctagggtgcccacagcnnnnnnnnnnnnnnnnnnnntgggagggccctggcagccatgtttaggaaacacagtatacccactccctgcaccaccagacacgnnnccacatctgtcccactctggtcctcgggggccactccacccttagggagcacatgaagaagctccctaagaagttctgctccttagccatcctttcctgtaatttatgtctctccctgaggtgaggttcaggtttatgtccctgtctgtggcatagatacatctcagtgacccagg

SEQ ID NO: 3735 - DNA, 351 bp, Mus musculus; identical to SEQ ID NO: 3734
  misc_feature (61)..(64): n is a, c, g, or t
  misc_feature (88)..(107): n is a, c, g, or t
  misc_feature (173)..(175): n is a, c, g, or t

SEQ ID NO: 3736 - DNA, 300 bp, Mus musculus
  misc_feature (222)..(222): n is a, c, g, or t
  misc_feature (228)..(231): n is a, c, g, or t
  misc_feature (233)..(234): n is a, c, g, or t
  misc_feature (238)..(252): n is a, c, g, or t
  misc_feature (254)..(262): n is a, c, g, or t
aaactcttgacttcttagtggtacactgtagaggtttatactttgattaatgtcagtactgtgggaacaggagtgttccttagggaatagattcccaataaaggatggactcaggtccttctgctctggcatgatctcaccctgtaacacctgagacagcaggaaggcatgtaactttggattctatacatacaataaataatctctatacctgtaataaanaaaaannnnannaaannnnnnnnnnnnnnnannnnnnnnnttttttttggggagaactggaaacctgtttatttcact

SEQ ID NO: 3737 - DNA, 300 bp, Mus musculus; identical to SEQ ID NO: 3736
  misc_feature (222)..(222): n is a, c, g, or t
  misc_feature (228)..(231): n is a, c, g, or t
  misc_feature (233)..(234): n is a, c, g, or t
  misc_feature (238)..(252): n is a, c, g, or t
  misc_feature (254)..(262): n is a, c, g, or t

SEQ ID NO: 3738 - DNA, 524 bp, Mus musculus
  misc_feature (40)..(40): n is a, c, g, or t
  misc_feature (137)..(137): n is a, c, g, or t
  misc_feature (163)..(163): n is a, c, g, or t
  misc_feature (450)..(453): n is a, c, g, or t
  misc_feature (455)..(455): n is a, c, g, or t
  misc_feature (457)..(460): n is a, c, g, or t
  misc_feature (463)..(463): n is a, c, g, or t
  misc_feature (499)..(499): n is a, c, g, or t
acctatgtatacagtaaggttatcaggaggggtccttttnaaatataagtaatatggttgtttctcatgaaaccattgtccattcccatatatatacatattgatctgtttaagtgtattcttactgggcccttttntcataattaaagattccccttcattntcattccaccgttcaacacttcctgagtttaacctctgggggactcttgagttgttgtataaagcacaccactgatcatgtctaccatgggagagtattttcacaaagtatctcacagagaacctggaacatgggagccattctgcaagtgtccctcaaccctcttgtcacttgtttgggagaagtaagagaatatcacatagaacaaagatgacatcagtgtggttgttcttgaccatccccttctcagggattttgatcaaagatttgtatctcattatcttaannnncntnnnnatnccaaactgaggctagtgtacatattctggtgaacangtttgataacaacactgctgtctgt

SEQ ID NO: 3739 - DNA, 524 bp, Mus musculus; identical to SEQ ID NO: 3738
  misc_feature (40)..(40): n is a, c, g, or t
  misc_feature (137)..(137): n is a, c, g, or t
  misc_feature (163)..(163): n is a, c, g, or t
  misc_feature (450)..(453): n is a, c, g, or t
  misc_feature (455)..(455): n is a, c, g, or t
  misc_feature (457)..(460): n is a, c, g, or t
  misc_feature (463)..(463): n is a, c, g, or t
  misc_feature (499)..(499): n is a, c, g, or t

SEQ ID NO: 3740 - DNA, 120 bp, Mus musculus
tgcactgcccgcagtgagtgcaggttctgtttttgagtttggtagtttgcaaagtgagtacactgaagaaacgttagttagtggggcaatacattcatgcaaggttggtggcgccttaga

SEQ ID NO: 3741 - DNA, 120 bp, Mus musculus; identical to SEQ ID NO: 3740

SEQ ID NO: 3742 - DNA, 168 bp, Mus musculus
tgctcggggacaggacctagagactgggtaccagagacaaagagatgtagaaacagataagaaccgtcaagtcaccctaatggaatcaggggccctaagaggcggagagcctggagagaaacgggcgggagacagaacaaaggacgacaggcggagacaaaggtagaa

SEQ ID NO: 3743 - DNA, 168 bp, Mus musculus; identical to SEQ ID NO: 3742

SEQ ID NO: 3744 - DNA, 162 bp, Mus musculus
  misc_feature (26)..(26): n is a, c, g, or t
  misc_feature (34)..(48): n is a, c, g, or t
  misc_feature (94)..(94): n is a, c, g, or t
tagaaaagctgcagatcctcactggntacttgcnnnnnnnnnnnnnnnattgcatttggtgtgggacagcctatgaagataaagaagacttatnttcgaattgcccaggaccgacctctgcggatcacgactgagattgttcccaataaagggaaatcattt

SEQ ID NO: 3745 - DNA, 162 bp, Mus musculus; identical to SEQ ID NO: 3744
  misc_feature (26)..(26): n is a, c, g, or t
  misc_feature (34)..(48): n is a, c, g, or t
  misc_feature (94)..(94): n is a, c, g, or t

SEQ ID NO: 3746 - DNA, 336 bp, Mus musculus
  misc_feature (27)..(27): n is a, c, g, or t
  misc_feature (60)..(60): n is a, c, g, or t
  misc_feature (68)..(82): n is a, c, g, or t
  misc_feature (128)..(128): n is a, c, g, or t
  misc_feature (241)..(241): n is a, c, g, or t
  misc_feature (254)..(275): n is a, c, g, or t
  misc_feature (291)..(291): n is a, c, g, or t
  misc_feature (293)..(293): n is a, c, g, or t
gaagatgagtgcccgagtgaagatttnagtgtgctagaaaagctgcagatcctcactggntacttgcnnnnnnnnnnnnnnnattgcatttggtgtgggacagcctatgaagataaagaagacttatnttcgaattgcccaggaccgacctctgcggatcacgactgagattgttcccaataaagggaaatcatttacgtgagtggggaaaggaggcctttgtatagcactttattctttntgaaatgtgttcnnnnnnnnnnnnnnnnnnnnnntttagaaaaatgttantnttacttccaaatacaactatcatagacatgaacagttaaaaaa

SEQ ID NO: 3747 - DNA, 336 bp, Mus musculus; identical to SEQ ID NO: 3746
  misc_feature (27)..(27): n is a, c, g, or t
  misc_feature (60)..(60): n is a, c, g, or t
  misc_feature (68)..(82): n is a, c, g, or t
  misc_feature (128)..(128): n is a, c, g, or t
  misc_feature (241)..(241): n is a, c, g, or t
  misc_feature (254)..(275): n is a, c, g, or t
  misc_feature (291)..(291): n is a, c, g, or t
  misc_feature (293)..(293): n is a, c, g, or t

SEQ ID NO: 3748 - DNA, 379 bp, Mus musculus
  misc_feature (179)..(180): n is a, c, g, or t
  misc_feature (182)..(183): n is a, c, g, or t
  misc_feature (185)..(189): n is a, c, g, or t
  misc_feature (191)..(196): n is a, c, g, or t
  misc_feature (198)..(198): n is a, c, g, or t
  misc_feature (202)..(203): n is a, c, g, or t
  misc_feature (248)..(248): n is a, c, g, or t
gaacccaaccttgctggcagaactccggctcctcagacagcgaaaggatgagctagaacagagaatgtctgctctccaggagagccggagagagctgatggtccagttggaaggtctcatgaagctcctgaagacccagggggcaagctccccacgctcttcccccagccacaccatcnncnngnnnnncnnnnnncncatnngttcaattccacgcaaggagccacaagcaaagaactccactgtgntcctcagaaggtagggcatttttcctttgaaccaaaaagaaaaagaaaaaagtcacaagcattcattgtattttgaggctaattaacataagacattttaaattgtgactactgtaatttgacctcatttg

SEQ ID NO: 3749 - DNA, 181 bp, Mus musculus
  misc_feature (26)..(26): n is a, c, g, or t
  misc_feature (31)..(31): n is a, c, g, or t
  misc_feature (47)..(47): n is a, c, g, or t
  misc_feature (66)..(66): n is a, c, g, or t
gagtcactgtcatcagccatcactanctatnttggtaaatgagaganctgacctggcaccttacangcagaaaagcggcccacactaagaaaggactgcaaatcagtgagtctgtatagaacattttaccttcactgacttgggccgatgtgtttgtcatctctgtgtttttctagagcaa

SEQ ID NO: 3750 - DNA, 181 bp, Mus musculus; identical to SEQ ID NO: 3749
  misc_feature (26)..(26): n is a, c, g, or t
  misc_feature (31)..(31): n is a, c, g, or t
  misc_feature (47)..(47): n is a, c, g, or t
  misc_feature (66)..(66): n is a, c, g, or t

SEQ ID NO: 3751 - DNA, 573 bp, Mus musculus
  misc_feature (325)..(325): n is a, c, g, or t
  misc_feature (348)..(348): n is a, c, g, or t
  misc_feature (380)..(380): n is a, c, g, or t
  misc_feature (392)..(392): n is a, c, g, or t
  misc_feature (469)..(469): n is a, c, g, or t
  misc_feature (471)..(471): n is a, c, g, or t
  misc_feature (490)..(490): n is a, c, g, or t
  misc_feature (504)..(504): n is a, c, g, or t
  misc_feature (525)..(525): n is a, c, g, or t
  misc_feature (527)..(527): n is a, c, g, or t
taacttgggagcacacgcgcacgcacatacacacacgtacacagactctgttctcatccaacagcagatccacagcctctgaattccacttcagatcagagccctgcatcgtctccttctccaggctgacaggtctgagaagcctgccttgcgcttgccttccccagtgcaccccaccctgccactgcacctcattcttcctgaacttcgaaaccaaccaaaacgtgaaaagtatttttgtaccctgtgtaacaaaatatttatggatcataaagggtttttcatgtgtttaccattaattattaaagagaccttgttcagcctntcagataagtttaatgtttagtntgaagcatgaagaagaaaaggggtttccgttntttagcagttgncctttgtgtcgggctttggtttaagaagaatgagatgaaggataaattgtgcaattttgttttattttacgagcatntntgtgctttacctttaaacntcagctcggatatntggctacttcggacaatgatntntggaggtggctgttgtaattggtgaccctgtgagaatgtgaaactg

SEQ ID NO: 3752 - DNA, 573 bp, Mus musculus; identical to SEQ ID NO: 3751
  misc_feature (325)..(325): n is a, c, g, or t
  misc_feature (348)..(348): n is a, c, g, or t
  misc_feature (380)..(380): n is a, c, g, or t
  misc_feature (392)..(392): n is a, c, g, or t
  misc_feature (469)..(469): n is a, c, g, or t
  misc_feature (471)..(471): n is a, c, g, or t
  misc_feature (490)..(490): n is a, c, g, or t
  misc_feature (504)..(504): n is a, c, g, or t
  misc_feature (525)..(525): n is a, c, g, or t
  misc_feature (527)..(527): n is a, c, g, or t

SEQ ID NO: 3753 - DNA, 192 bp, Mus musculus
tgactccctttcagggaaagcctggtttagggcagggtttttgccccctctgcaaacagctttggagccccagtttgcaaaggaaagccaatgccttctatactggctgagggggtggacatggtcccctgtgaaacttgctgtccaaaaagtataaacctggggcctggcagctccccagctaaaggatgg

SEQ ID NO: 3754 - DNA, 192 bp, Mus musculus; identical to SEQ ID NO: 3753

SEQ ID NO: 3755 - DNA, 418 bp, Mus musculus
  misc_feature (121)..(137): n is a, c, g, or t
  misc_feature (181)..(181): n is a, c, g, or t
  misc_feature (183)..(183): n is a, c, g, or t
  misc_feature (232)..(232): n is a, c, g, or t
  misc_feature (234)..(237): n is a, c, g, or t
  misc_feature (239)..(241): n is a, c, g, or t
  misc_feature (243)..(250): n is a, c, g, or t
  misc_feature (252)..(252): n is a, c, g, or t
  misc_feature (276)..(276): n is a, c, g, or t
  misc_feature (278)..(281): n is a, c, g, or t
gagagagcctagaccccgatgcatatgccctgtttcacaagaagctgaccgaggctgtgcttatgcgagaccccaagttcttgtggtgcgcccagtgttcctttggcttcatctatgaacnnnnnnnnnnnnnnnnnacgtgtccccagtgtcaccagaccttctgtgtgcgctgcaacangntgcggaggagcagcacagaggacggagttgtgaggatttccagaactgnannnncnnncnnnnnnnncngcccattcactggacccagctacntnnnntgaagtggaggagctggagacagccactattcgctacctacatttagctcctcagcccgcggatggagaggatctgcctgcttaccaggcccggctattacagaagctgagagaagaggtacccttgggacagagta

SEQ ID NO: 3756 - DNA, 418 bp, Mus musculus; identical to SEQ ID NO: 3755
  misc_feature (121)..(137): n is a, c, g, or t
  misc_feature (181)..(181): n is a, c, g, or t
  misc_feature (183)..(183): n is a, c, g, or t
  misc_feature (232)..(232): n is a, c, g, or t
  misc_feature (234)..(237): n is a, c, g, or t
  misc_feature (239)..(241): n is a, c, g, or t
  misc_feature (243)..(250): n is a, c, g, or t
  misc_feature (252)..(252): n is a, c, g, or t
  misc_feature (276)..(276): n is a, c, g, or t
  misc_feature (278)..(281): n is a, c, g, or t

SEQ ID NO: 3757 - DNA, 240 bp, Mus musculus
  misc_feature (160)..(160): n is a, c, g, or t
ccatggtcttccatcttttctgaagtatatagtatagctgttttgtgtgtcgggagggtgtggtggtggggagacaggaattttgctgtttttgttcaggttagcttcacttacagctgtcttctgcctcagtcttccaagtgctggaactacagatgtntgcctagcttttccttaatgtctttgttagacatctcccccgactttatgtgatttctgatccagctgtatacacacctt

SEQ ID NO: 3758 - DNA, 242 bp, Mus musculus
  misc_feature (160)..(160): n is a, c, g, or t
ccatggtcttccatcttttctgaagtatatagtatagctgttttgtgtgtcgggagggtgtggtggtggggagacaggaattttgctgtttttgttcaggttagcttcacttacagctgtcttctgcctcagtcttccaagtgctggaactacagatgtntgcctagcttttccttaatgtctttgttagacatctcccccgactttatgtgatttctgatccagctgtatacacaccttgg

SEQ ID NO: 3759 - DNA, 577 bp, Mus musculus
  misc_feature (120)..(120): n is a, c, g, or t
  misc_feature (127)..(170): n is a, c, g, or t
cctaattttctgatgatagtaggctagttttaatttcttgatcactttcaggacagcttgcctggacagcacacagaccttcagctcggagtgctcaggtggcaagcccgtggaggtgtnggggtannnnnnnnnnnnnnnnnnnnnnnnnnnnnnnnnnnnnnnnnnnnctaaagctgacacaatttgcatttcataaatacatagtttacagaaccatttgcagcctcaattttctttgtgcttgttatataaattatttttcaaactgtatagattcatgataaaattatcttggttcctctctcttttaccgtgagaggaaaagacttcatttttatcttatacctaatttttttaaaaccccgtgatgacattaaacagaattttttttccaacataagatctgcacagcagacttttaaaaagcctgaaatctgtctggtagaacaatttgtgttctccttttttcataattatatattgtctgtttaaaatattttccagttgttttgtctataaaacggtatctatattcttaatggttctttgtacaattttgatggtttctacctgt

SEQ ID NO: 3760 - DNA, 577 bp, Mus musculus; identical to SEQ ID NO: 3759
  misc_feature (120)..(120): n is a, c, g, or t
  misc_feature (127)..(170): n is a, c, g, or t

SEQ ID NO: 3761 - DNA, 503 bp, Mus musculus
  misc_feature (60)..(60): n is a, c, g, or t
  misc_feature (207)..(207): n is a, c, g, or t
  misc_feature (314)..(335): n is a, c, g, or t
tcccactaagtcacatttggtggtggccagccaagtcccgtgtggtctagtctgacttantatcccgggctgagaaaggaacgggaatggttttgccccagtgagacccacaccgctggagcagggactttgagcatctccgctccggtgttgactgttgatgtatttgatattctgcttatctcccaatggcggaaagaactctgnaaaaaaaaatagcagcgtaatctcttggctgtttatacttttttaaacttccctgtgttgtaaatattgtacactctgagtaaccccagctatgtaaccttgatgcnnnnnnnnnnnnnnnnnnnnnntagcaacctggcccagtgatgttatataatttcccaatggagaggttattgagtagccttggcctctagttttaaacactaccagaagaatgctgagccaactataaacactcaatttttgtatgttttccaaattgtacttattaccgcttttgatactgtattctg

SEQ ID NO: 3762 - DNA, 503 bp, Mus musculus; identical to SEQ ID NO: 3761
  misc_feature (60)..(60): n is a, c, g, or t
  misc_feature (207)..(207): n is a, c, g, or t
  misc_feature (314)..(335): n is a, c, g, or t

SEQ ID NO: 3763 - DNA, 398 bp, Mus musculus
  misc_feature (171)..(171): n is a, c, g, or t
  misc_feature (226)..(226): n is a, c, g, or t
  misc_feature (237)..(238): n is a, c, g, or t
  misc_feature (259)..(259): n is a, c, g, or t
  misc_feature (261)..(261): n is a, c, g, or t
  misc_feature (286)..(286): n is a, c, g, or t
  misc_feature (288)..(303): n is a, c, g, or t
  misc_feature (310)..(310): n is a, c, g, or t
  misc_feature (332)..(332): n is a, c, g, or t
tgcaagttccttctgcaccctgatttccgctaaggactgtcgtctctgggctgcagctgtggagttggctcagtaggagaggaggtccaacagggatctgccactagagcctgtctgtgtgcaagcgtggtgtgtgtctgtccttccctctccctgtggatgtgcgcatgnaaccatacagcaaaagcacatacaattccgcatcccttgggagagcctccggtgnccgacaaggcnnttctgtcaccgtggtgcactntntcactggagtggatgtagagggctntnnnnnnnnnnnnnnnntgagctntcccccctccccggaacaagtntccacatcacttgttccaagttgccttatgaggtgggaccctttactggctgattgcgggcgacac

SEQ ID NO: 3764 - DNA, 398 bp, Mus musculus; identical to SEQ ID NO: 3763
  misc_feature (171)..(171): n is a, c, g, or t
  misc_feature (226)..(226): n is a, c, g, or t
  misc_feature (237)..(238): n is a, c, g, or t
  misc_feature (259)..(259): n is a, c, g, or t
  misc_feature (261)..(261): n is a, c, g, or t
  misc_feature (286)..(286): n is a, c, g, or t
  misc_feature (288)..(303): n is a, c, g, or t
  misc_feature (310)..(310): n is a, c, g, or t
  misc_feature (332)..(332): n is a, c, g, or t

SEQ ID NO: 3765 - DNA, 564 bp, Mus musculus
  misc_feature (31)..(32): n is a, c, g, or t
  misc_feature (50)..(50): n is a, c, g, or t
  misc_feature (150)..(150): n is a, c, g, or t
  misc_feature (226)..(226): n is a, c, g, or t
  misc_feature (231)..(231): n is a, c, g, or t
  misc_feature (245)..(245): n is a, c, g, or t
  misc_feature (283)..(283): n is a, c, g, or t
  misc_feature (295)..(296): n is a, c, g, or t
  misc_feature (301)..(301): n is a, c, g, or t
  misc_feature (321)..(321): n is a, c, g, or t
  misc_feature (464)..(464): n is a, c, g, or t
  misc_feature (474)..(474): n is a, c, g, or t
  misc_feature (483)..(484): n is a, c, g, or t
  misc_feature (486)..(486): n is a, c, g, or t
  misc_feature (488)..(488): n is a, c, g, or t
  misc_feature (492)..(492): n is a, c, g, or t
  misc_feature (497)..(497): n is a, c, g, or t
  misc_feature (504)..(504): n is a, c, g, or t
  misc_feature (512)..(512): n is a, c, g, or t
  misc_feature (519)..(519): n is a, c, g, or t
tctccaaggagaaggcaggaagccctctggnntggaggatgggcaggagnctcaggaagactgtgggcattttgggcagaggcagccccagtgggtcctggctgtccttgttggctggggctcttgagctcggtgatgaaggagaccatnatcgtctgtctgggttgaggcctcttggctcttttgctttggaggcggcctatgacggtttgcagcctctcctctnggganccctgaagctgcanggctgtgggggcctcaggctggctgtaggattccttgnacctgcggcccnngggcnaggacttctcttctggctgnccaagcccaactttgtccttgccagcctggcagtgagcaccatccctggttccagtgcgcttctgctggggtcctgctgcaggcctgcaacctgaatagactcgggttctgtgctgcttcctgagctcccacccccaagctgnggcttcatgntcctgctgnnangnaaangtctnctgggcnagatcccnttcgaancagacttggccactggagggagtctctggaatggtgctggcagca

SEQ ID NO: 3766 - DNA, 564 bp, Mus musculus; identical to SEQ ID NO: 3765
  misc_feature (31)..(32): n is a, c, g, or t
  misc_feature (50)..(50): n is a, c, g, or t
  misc_feature (150)..(150): n is a, c, g, or t
  misc_feature (226)..(226): n is a, c, g, or t
  misc_feature (231)..(231): n is a, c, g, or t
  misc_feature (245)..(245): n is a, c, g, or t
  misc_feature (283)..(283): n is a, c, g, or t
  misc_feature (295)..(296): n is a, c, g, or t
  misc_feature (301)..(301): n is a, c, g, or t
  misc_feature (321)..(321): n is a, c, g, or t
  misc_feature (464)..(464): n is a, c, g, or t
  misc_feature (474)..(474): n is a, c, g, or t
  misc_feature (483)..(484): n is a, c, g, or t
  misc_feature (486)..(486): n is a, c, g, or t
  misc_feature (488)..(488): n is a, c, g, or t
  misc_feature (492)..(492): n is a, c, g, or t
  misc_feature (497)..(497): n is a, c, g, or t
  misc_feature (504)..(504): n is a, c, g, or t
  misc_feature (512)..(512): n is a, c, g, or t
  misc_feature (519)..(519): n is a, c, g, or t

SEQ ID NO: 3767 - DNA, 338 bp, Mus musculus
  misc_feature (32)..(32): n is a, c, g, or t
  misc_feature (38)..(38): n is a, c, g, or t
  misc_feature (40)..(40): n is a, c, g, or t
  misc_feature (42)..(42): n is a, c, g, or t
  misc_feature (47)..(48): n is a, c, g, or t
  misc_feature (283)..(283): n is a, c, g, or t
gtcctagagtaccactaaatacagatacatancatccncnangcgtnngcaaaccacagtttgggagcccagaaatgtcagaagggaagttagctgagagcaagctcacatttggcacaactagtctttccgaggtatactatttcatcttttctgcagcctgtcaaacgcgtatgtgtacattatttagaggaaaaaaaataactttattaaaaaattagacaaagcacttgatcaaagtgaatttcatgtacccaatagcataccatcatctttgcaatantgtaatatacatgggtacctacctctgcgaaatgtcaatgacaaaacctaagtgt

SEQ ID NO: 3768 - DNA, 338 bp, Mus musculus; identical to SEQ ID NO: 3767
  misc_feature (32)..(32): n is a, c, g, or t
  misc_feature (38)..(38): n is a, c, g, or t
  misc_feature (40)..(40): n is a, c, g, or t
  misc_feature (42)..(42): n is a, c, g, or t
  misc_feature (47)..(48): n is a, c, g, or t
  misc_feature (283)..(283): n is a, c, g, or t

SEQ ID NO: 3769 - DNA, 337 bp, Mus musculus
  misc_feature (37)..(37): n is a, c, g, or t
  misc_feature (39)..(40): n is a, c, g, or t
  misc_feature (43)..(45): n is a, c, g, or t
aatgcggttctatttggcatctgtcttaattccttantnncannngcccacccactcaaccaagctgttgtgggtggccagtttctctccatcattagtgatgtgtagtctctcagagactgattactgactcctgtttaacctctactgccagaaaaatgttaccttatcttttcttaatttgccttgccttttattaaatgaataagtagagaaatgttagtaaaatggtaaaagggaatcacgtgacattcagggtaggaagagcttggatgctgtagatgtatgtctctctaattaacttttttttttctgtactgattcttacagcaggttt

SEQ ID NO: 3770 - DNA, 337 bp, Mus musculus; identical to SEQ ID NO: 3769
  misc_feature (37)..(37): n is a, c, g, or t
  misc_feature (39)..(40): n is a, c, g, or t
  misc_feature (43)..(45): n is a, c, g, or t

SEQ ID NO: 3771 - DNA, 524 bp, Mus musculus
  misc_feature (34)..(103): n is a, c, g, or t
  misc_feature (278)..(278): n is a, c, g, or t
  misc_feature (387)..(387): n is a, c, g, or t
  misc_feature (390)..(390): n is a, c, g, or t
gtcttatagaccataaagacaaatgaatgcagtnnnnnnnnnnnnnnnnnnnnnnnnnnnnnnnnnnnnnnnnnnnnnnnnnnnnnnnnnnnnnnnnnnnnnntcaaggaagaaaagaaaggaggacgggagggaaggaggaaagaaacacctagaattctgatatgtttggtgtggtgaaagaaactaaaaataaatattgtccagactcttgacatgctgtcatatctagtaaggccatggttccaactgcagaggcgttatagtatgaagctaangttcccacccgtgggaacacagtgttggcctctctgtggagtgcagacccctgactctgagctccagctcccgtttaccagccaggactgggacagttcctcaactccntgnggcttcagaataaaggatgctttaccaggtagctggagatgctacagctaatggacccgtgtaggctccaaaccctaagaagcaattagaagggggtgtggattatgctaatgaggacaaagctccctggctcc

SEQ ID NO: 3772 - DNA, 524 bp, Mus musculus; identical to SEQ ID NO: 3771
  misc_feature (34)..(103): n is a, c, g, or t
  misc_feature (278)..(278): n is a, c, g, or t
  misc_feature (387)..(387): n is a, c, g, or t
  misc_feature (390)..(390): n is a, c, g, or t

SEQ ID NO: 3773 - DNA, 218 bp, Mus musculus
gggcaacctcgttccgaatggtcgactgatcacgaaattccaccttgaccaagtcctgctctggcacacacgtaaagtgttgtcccgtcgtccactggtagaggaccacctagctccctgaacttcgtgtacctgcataagcagattcgtcgtagcaatgttggttgtggttactagcgtgacaggtctgttaagtagccggccctgatgaaccttga

SEQ ID NO: 3774 - DNA, 218 bp, Mus musculus; identical to SEQ ID NO: 3773

SEQ ID NO: 3775 - DNA, 236 bp, Mus musculus
  misc_feature (160)..(161): n is a, c, g, or t
ctgtgcatagacagttgagaacatcatgttgtgagtgtaatcttcttagagcttgtttccaggcaccgtgctgccgccatgctcccagggcagcatctgccttccacggctgtgcttggaactgtagtgctggtcgttgttggcacatctgcgccttggnnaaggaagttatctatgtccgtgtagtcctttgtagtcagacagatgcttcgtggactgtgcctcacacatggccc

SEQ ID NO: 3776 - DNA, 236 bp, Mus musculus; identical to SEQ ID NO: 3775
  misc_feature (160)..(161): n is a, c, g, or t

SEQ ID NO: 3777 - DNA, 607 bp, Mus musculus
  misc_feature (152)..(152): n is a, c, g, or t
  misc_feature (232)..(232): n is a, c, g, or t
  misc_feature (366)..(366): n is a, c, g, or t
  misc_feature (385)..(386): n is a, c, g, or t
  misc_feature (389)..(389): n is a, c, g, or t
  misc_feature (391)..(400): n is a, c, g, or t
  misc_feature (477)..(500): n is a, c, g, or t
  misc_feature (542)..(542): n is a, c, g, or t
aagcctatgtcaagtgtcaagaaaaagtcagtcagctgtatatgaatcaaaaagcctggaacacaatggtactcaaaaacatagctgcctcagggaagttctccagtgaccgaacaattaaggagtatgccaaggacatctggaacatgganccttcggatctgaagatttccctatccaacgagtccagcaatggggtcagtgccaatgggaagtgaatgctaaaatgtantcttattcaatgacttcttatggaacttgagtgttttagagcttccctgattctgtttttgtcattgaatagttaagtgtctccggggatgggaagggaaaatgtatgtctgtattagagctaaaaataaaatntcaacttccagttgtcaannaanannnnnnnnnnattcctttcctcaaaagaaatagaggatttcctagagctctcagggactaaaccaccaaccgaagagtacacatggnnnnnnnnnnnnnnnnnnnnnnnnaaagaggattgtcttatctggcatcagtgggaggggaggccnttggtcctgtggaagcttgatgccccagtgtagggggatgctagagccatgatgaggcaggaatg

SEQ ID NO: 3778 - DNA, 607 bp, Mus musculus; identical to SEQ ID NO: 3777
  misc_feature (152)..(152): n is a, c, g, or t
  misc_feature (232)..(232): n is a, c, g, or t
  misc_feature (366)..(366): n is a, c, g, or t
  misc_feature (385)..(386): n is a, c, g, or t
  misc_feature (389)..(389): n is a, c, g, or t
  misc_feature (391)..(400): n is a, c, g, or t
  misc_feature (477)..(500): n is a, c, g, or t
  misc_feature (542)..(542): n is a, c, g, or t

SEQ ID NO: 3779 - DNA, 429 bp, Mus musculus
  misc_feature (35)..(85): n is a, c, g, or t
  misc_feature (105)..(126): n is a, c, g, or t
  misc_feature (186)..(200): n is a, c, g, or t
  misc_feature (258)..(272): n is a, c, g, or t
  misc_feature (352)..(352): n is a, c, g, or t
  misc_feature (356)..(356): n is a, c, g, or t
  misc_feature (372)..(372): n is a, c, g, or t
  misc_feature (374)..(379): n is a, c, g, or t
  misc_feature (396)..(396): n is a, c, g, or t
gctctgtggccttgtctgtgacacaagaccctgcnnnnnnnnnnnnnnnnnnnnnnnnnnnnnnnnnnnnnnnnnnnnnnnnnnngggtgcctgagtaatgaccnnnnnnnnnnnnnnnnnnnnnnagctctttcagcctcattgcatctccatggacatcagcaggccccttgagtggttgagannnnnnnnnnnnnnnaaccctcctgcctagctcagcccaggatgccagactcctaggacatcagcagtccccnnnnnnnnnnnnnnnatagccctacactgtccccatgtgcccagcagcctgacactaagaaatctctcaataaaggcatcctgctgaatgagtanttgngagttttaggtggcanannnnnnttcccctgtcatgtgtnacttggggacaacagttgccacagggagttaga

SEQ ID NO: 3780 - DNA, 429 bp, Mus musculus; identical to SEQ ID NO: 3779
  misc_feature (35)..(85): n is a, c, g, or t
  misc_feature (105)..(126): n is a, c, g, or t
  misc_feature (186)..(200): n is a, c, g, or t
  misc_feature (258)..(272): n is a, c, g, or t
  misc_feature (352)..(352): n is a, c, g, or t
  misc_feature (356)..(356): n is a, c, g, or t
  misc_feature (372)..(372): n is a, c, g, or t
  misc_feature (374)..(379): n is a, c, g, or t
  misc_feature (396)..(396): n is a, c, g, or t

SEQ ID NO: 3781 - DNA, 486 bp, Mus musculus
  misc_feature (26)..(29): n is a, c, g, or t
  misc_feature (31)..(33): n is a, c, g, or t
  misc_feature (179)..(179): n is a, c, g, or t
  misc_feature (255)..(255): n is a, c, g, or t
  misc_feature (275)..(291): n is a, c, g, or t
  misc_feature (297)..(297): n is a, c, g, or t
  misc_feature (299)..(300): n is a, c, g, or t
  misc_feature (342)..(342): n is a, c, g, or t
  misc_feature (360)..(360): n is a, c, g, or t
  misc_feature (378)..(378): n is a, c, g, or t
  misc_feature (389)..(389): n is a, c, g, or t
  misc_feature (391)..(391): n is a, c, g, or t
  misc_feature (394)..(394): n is a, c, g, or t
aacccacagggcactaaggaaagagnnnncnnnattctctctcacacctatatcctgctggaatgggagacaggatagtcatggctattcatccctgtctatcacaaggattcttggtaagagaaatacaggagggatttgtcacccatcatgtgcattccatatacctgggctcagcntgcagatggtacaagcatacgccttgacatgacgtgacatatcgtcagatctggtgtttttacacctagaggcatnggtgttctctgaggtctttnnnnnnnnnnnnnnnnnagatantnntcagtgtgtgagaaacaaatgtcacacaaggtcagtaacttntgctatgaggccatgatntctggctcctgatgtatntctgttcactntnttntgtgctgttttctgttgtggtcaatgtgattggaactttgagtagtatttgggggtacttctaagtgggaagcattacactttgccaaatca

SEQ ID NO: 3782 - DNA, 486 bp, Mus musculus; identical to SEQ ID NO: 3781
  misc_feature (26)..(29): n is a, c, g, or t
  misc_feature (31)..(33): n is a, c, g, or t
  misc_feature (179)..(179): n is a, c, g, or t
  misc_feature (255)..(255): n is a, c, g, or t
  misc_feature (275)..(291): n is a, c, g, or t
  misc_feature (297)..(297): n is a, c, g, or t
  misc_feature (299)..(300): n is a, c, g, or t
  misc_feature (342)..(342): n is a, c, g, or t
  misc_feature (360)..(360): n is a, c, g, or t
  misc_feature (378)..(378): n is a, c, g, or t
  misc_feature (389)..(389): n is a, c, g, or t
  misc_feature (391)..(391): n is a, c, g, or t
  misc_feature (394)..(394): n is a, c, g, or t

SEQ ID NO: 3783 - DNA, 600 bp, Mus musculus
  misc_feature (89)..(89): n is a, c, g, or t
  misc_feature (93)..(93): n is a, c, g, or t
  misc_feature (99)..(99): n is a, c, g, or t
  misc_feature (102)..(103): n is a, c, g, or t
  misc_feature (110)..(110): n is a, c, g, or t
  misc_feature (119)..(119): n is a, c, g, or t
  misc_feature (124)..(124): n is a, c, g, or t
  misc_feature (129)..(129): n is a, c, g, or t
  misc_feature (158)..(188): n is a, c, g, or t
  misc_feature (192)..(192): n is a, c, g, or t
  misc_feature (199)..(199): n is a, c, g, or t
  misc_feature (215)..(215): n is a, c, g, or t
  misc_feature (230)..(230): n is a, c, g, or t
  misc_feature (290)..(290): n is a, c, g, or t
  misc_feature (360)..(361): n is a, c, g, or t
  misc_feature (491)..(505): n is a, c, g, or t
tcagcatgtattgatagaggcactgacatgtgaccgtttgagtgagatattagttgctgtgaggttttgattgattgtttgcttgcttnagtncgttgnttnnttgtttncaaagcttngtaantgtcnggcaggtgttgcttgctgaagcttgctannnnnnnnnnnnnnnnnnnnnnnnnnnnnnncatnctgatanatgatggaaggtcttnggctcattaatactnttctcagattttgggtcttataaacagaatgtcctctgcatttcctctggattctatttnaattgtactttctcattctccctgcaaacacaccctgattctgtgtgcatgcatgtgtgtgtgtgtgtgnnactctctctatattctggtcataagggtatgtggtaggacctgaggaattgcctgccttacagtctgctgacaatgccaatgcttaggactggaaaccatacttcaagcaacaatgcacttgcattatgnnnnnnnnnnnnnnnaatatttgagttctgtggtgaattcaccatgacctcctcattctgggtaattctccctgaaatgtggattatatagtttggccaaattcatagga

SEQ ID NO: 3784 - DNA, 600 bp, Mus musculus; identical to SEQ ID NO: 3783
  misc_feature (89)..(89): n is a, c, g, or t
  misc_feature (93)..(93): n is a, c, g, or t
  misc_feature (99)..(99): n is a, c, g, or t
  misc_feature (102)..(103): n is a, c, g, or t
  misc_feature (110)..(110): n is a, c, g, or t
  misc_feature (119)..(119): n is a, c, g, or t
  misc_feature (124)..(124): n is a, c, g, or t
  misc_feature (129)..(129): n is a, c, g, or t
  misc_feature (158)..(188): n is a, c, g, or t
  misc_feature (192)..(192): n is a, c, g, or t
  misc_feature (199)..(199): n is a, c, g, or t
  misc_feature (215)..(215): n is a, c, g, or t
  misc_feature (230)..(230): n is a, c, g, or t
  misc_feature (290)..(290): n is a, c, g, or t
  misc_feature (360)..(361): n is a, c, g, or t
  misc_feature (491)..(505): n is a, c, g, or t

SEQ ID NO: 3785 - DNA, 157 bp, Mus musculus
caattttgattcctagaataattttataagtgaatgacaaatatcatagttatgttaaaaatatctgtcgttaacatgagttagtgcctaacctaatggccactgaataactgcatctttcattttagagaaataaaccattttattggatcttaat

SEQ ID NO: 3786 - DNA, 157 bp, Mus musculus; identical to SEQ ID NO: 3785

SEQ ID NO: 3787 - DNA, 268 bp, Mus musculus
  misc_feature (129)..(129): n is a, c, g, or t
ttattctaccctagcacttgagaagtagaagcaggagaatcaggagttcaaggccaacctcaggtaatagtaaattcaaggccaatgtggctcaccttcccttctccccagattaatagagcacacaanagtaaaattatggtagttttattttttagagtactttaaaataaaacttatcttcatatgcatatatgtatatacgatatatgtttatatatattctgctggatcatatctgcctggtgtcacagtgtattcaacattt

SEQ ID NO: 3788 - DNA, 268 bp, Mus musculus; identical to SEQ ID NO: 3787
  misc_feature (129)..(129): n is a, c, g, or t

SEQ ID NO: 3789 - DNA, 594 bp, Mus musculus
  misc_feature (30)..(30): n is a, c, g, or t
  misc_feature (62)..(62): n is a, c, g, or t
  misc_feature (69)..(69): n is a, c, g, or t
  misc_feature (79)..(79): n is a, c, g, or t
  misc_feature (85)..(85): n is a, c, g, or t
  misc_feature (90)..(90): n is a, c, g, or t
  misc_feature (94)..(94): n is a, c, g, or t
  misc_feature (112)..(112): n is a, c, g, or t
  misc_feature (132)..(132): n is a, c, g, or t
  misc_feature (135)..(135): n is a, c, g, or t
  misc_feature (157)..(157): n is a, c, g, or t
  misc_feature (184)..(184): n is a, c, g, or t
  misc_feature (189)..(189): n is a, c, g, or t
  misc_feature (218)..(218): n is a, c, g, or t
  misc_feature (222)..(222): n is a, c, g, or t
  misc_feature (229)..(229): n is a, c, g, or t
  misc_feature (231)..(231): n is a, c, g, or t
  misc_feature (235)..(235): n is a, c, g, or t
  misc_feature (237)..(238): n is a, c, g, or t
  misc_feature (241)..(254): n is a, c, g, or t
  misc_feature (481)..(519): n is a, c, g, or t
catggtggagacagcccaaggcaaagctcnaggtgcacccgtcctctgtaaaccgggacctnacaaacntacgggtggnctcttntaccnggangaaggtgaggtacaccanagtctacctgagagagacgnccntcatcaccccttttccagtttngctttttggaggtgacatagaagtccngcacngagagcggcttctgtctgtggacggctgnatcnattttcngncccngnnaannnnnnnnnnnnnntttaagcagctaagagttctcattgattctgttttaagaaaaaaacttgaaaatccaaagatgtcccttgaaaatgacaagattctacagatcattacagaattgataaaaacagagaataattgacactggaatccacggttgtctgcttgtaaagttaagataaagatacggtcctgaaatgatgtggaggtcagctgtcccactaagtatttcattacctaaannnnnnnnnnnnnnnnnnnnnnnnnnnnnnnnnnnnnnngaaagagcacattctttcaacgtggacttttctagctcctttgtaacgatgatgatactcaatgtatttgccatg

SEQ ID NO: 3790 - DNA, 594 bp, Mus musculus; identical to SEQ ID NO: 3789
  misc_feature (30)..(30): n is a, c, g, or t
  misc_feature (62)..(62): n is a, c, g, or t
  misc_feature (69)..(69): n is a, c, g, or t
  misc_feature (79)..(79): n is a, c, g, or t
  misc_feature (85)..(85): n is a, c, g, or t
  misc_feature (90)..(90): n is a, c, g, or t
  misc_feature (94)..(94): n is a, c, g, or t
  misc_feature (112)..(112): n is a, c, g, or t
  misc_feature (132)..(132): n is a, c, g, or t
  misc_feature (135)..(135): n is a, c, g, or t
  misc_feature (157)..(157): n is a, c, g, or t
  misc_feature (184)..(184): n is a, c, g, or t
  misc_feature (189)..(189): n is a, c, g, or t
  misc_feature (218)..(218): n is a, c, g, or t
  misc_feature (222)..(222): n is a, c, g, or t
  misc_feature (229)..(229): n is a, c, g, or t
  misc_feature (231)..(231): n is a, c, g, or t
  misc_feature (235)..(235): n is a, c, g, or t
  misc_feature (237)..(238): n is a, c, g, or t
  misc_feature (241)..(254): n is a, c, g, or t
  misc_feature (481)..(519): n is a, c, g, or t

SEQ ID NO: 3791 - DNA, 77 bp, Mus musculus
aaacttcagtcttattgtgtttgtcctgaaatgccatgatattccacataggaatccaggtaattgtggacgcccac

SEQ ID NO: 3792 - DNA, 77 bp, Mus musculus; identical to SEQ ID NO: 3791

SEQ ID NO: 3793 - DNA, 477 bp, Mus musculus
  misc_feature (72)..(104): n is a, c, g, or t
  misc_feature (241)..(241): n is a, c, g, or t
  misc_feature (270)..(270): n is a, c, g, or t
  misc_feature (274)..(275): n is a, c, g, or t
  misc_feature (277)..(288): n is a, c, g, or t
  misc_feature (324)..(324): n is a, c, g, or t
  misc_feature (389)..(391): n is a, c, g, or t
  misc_feature (400)..(400): n is a, c, g, or t
  misc_feature (421)..(422): n is a, c, g, or t
  misc_feature (425)..(425): n is a, c, g, or t
  misc_feature (452)..(452): n is a, c, g, or t
agactgccagtgctgtggctgctgtgggggtgatggaccagtctaacaggttatgatgagctgctccacgtnnnnnnnnnnnnnnnnnnnnnnnnnnnnnnnnngcccagccctgaccacatgtgttgctaattcctgtctggttcctctctggcagagcttgggaggcacaagagatccttttctctttccaaacagctttgcacaatctagaaattcagtgggtttttttttttttttncaaataaaaaactagttagataactttanaaannannnnnnnnnnnnaattccagaacgagttcaaagtagtttttttttttncattctttcccataagaaaagacaaaatagacaaggtcacttatcctgccatattgtctctttgnnnataaagatnttcatattttaggaatatttnnatnactcaagtggataaaacattaaaatgnaaaccagtttttcaggatgcatagg

SEQ ID NO: 3794 - DNA, 477 bp, Mus musculus; identical to SEQ ID NO: 3793
  misc_feature (72)..(104): n is a, c, g, or t
  misc_feature (241)..(241): n is a, c, g, or t
  misc_feature (270)..(270): n is a, c, g, or t
  misc_feature (274)..(275): n is a, c, g, or t
  misc_feature (277)..(288): n is a, c, g, or t
  misc_feature (324)..(324): n is a, c, g, or t
  misc_feature (389)..(391): n is a, c, g, or t
  misc_feature (400)..(400): n is a, c, g, or t
  misc_feature (421)..(422): n is a, c, g, or t
  misc_feature (425)..(425): n is a, c, g, or t
  misc_feature (452)..(452): n is a, c, g, or t

SEQ ID NO: 3795 - DNA, 470 bp, Mus musculus
  misc_feature (130)..(130): n is a, c, g, or t
  misc_feature (287)..(290): n is a, c, g, or t
  misc_feature (292)..(296): n is a, c, g, or t
  misc_feature (332)..(336): n is a, c, g, or t
  misc_feature (340)..(347): n is a, c, g, or t
  misc_feature (349)..(352): n is a, c, g, or t
  misc_feature (354)..(359): n is a, c, g, or t
  misc_feature (361)..(362): n is a, c, g, or t
  misc_feature (364)..(367): n is a, c, g, or t
tgaaccccgggacaaggtagtgataattcacttacatgggatggaaggagttctctaatttctcctggaccctggttcctgtcggagttcccgcccccacaacccccacaggagagacgtggctatcagncacttaggaacagcaccaagccctctcacatgcaaataaggtttcccccaaactctcagcccaagccaatgagaggggcttgctgtcaaactctaaatcactgccagaactgtatataggagagccattcagggaattaaaggaatgcgagtactannnnannnnntgacccttttgttccaagagctgtaacacttgggannnnntttnnnnnnnntnnnntnnnnnnanncnnnncctgagttccaccacattcctcactggattgtagcttttcaccaactcaggctcagagttaccaagcaacctggaaggtgtggcagaggcttagtctgtctcc

SEQ ID NO: 3796 - DNA, 470 bp, Mus musculus; identical to SEQ ID NO: 3795
  misc_feature (130)..(130): n is a, c, g, or t
  misc_feature (287)..(290): n is a, c, g, or t
  misc_feature (292)..(296): n is a, c, g, or t
  misc_feature (332)..(336): n is a, c, g, or t
  misc_feature (340)..(347): n is a, c, g, or t
  misc_feature (349)..(352): n is a, c, g, or t
  misc_feature (354)..(359): n is a, c, g, or t
  misc_feature (361)..(362): n is a, c, g, or t
  misc_feature (364)..(367): n is a, c, g, or t

SEQ ID NO: 3797 - DNA, 321 bp, Mus musculus
  misc_feature (121)..(121): n is a, c, g, or t
tgtcaaacctctagggctcaccaaagggttgcatggtcagcattttagggagatagaactttggaagtggagggagatagaaattaagttttctaggagacatcctgagggactggaaaantacaagaaactctccattcttttcatcttccagatccaggagccaggaagaaggggggctacttggccaacatggctgatcacgtgcctgaggtatgccctctgacctcaccagggtaacacagaaccatccatacaggccttgggcagctggaaatttacactggtagctctcccatgtcctaagttaggaactggatt

SEQ ID NO: 3798 - DNA, 321 bp, Mus musculus; identical to SEQ ID NO: 3797
  misc_feature (121)..(121): n is a, c, g, or t

SEQ ID NO: 3799 - DNA, 469 bp, Mus musculus
  misc_feature (213)..(213): n is a, c, g, or t
  misc_feature (220)..(220): n is a, c, g, or t
gctggggtagcatgcgtaagaattcacagtggctggggtagcatgcgtaagaattcacagtggctggggtagcatgcgtaagaattcacagtggctggggtagcatgcgtaagaactgcacaagaacaagccagaaagactgcagcatggcatcacacccctagctaaggagctactggcaactgatggctgccagaggaggagagtctgtcntcggcangagatgctgtcccctcagactctagcctgaacatcccgtcctgtgttgatggcactgtttatggacataagcttatgtgacctttaggagatacacacggctttgctggaggaagtgcatcactgggctttgagggtttatagcattggtcaacttcctgttctcactctcaacttcctgtctgtggctgaggagcagtctctcagcttcctgttctggcctctgactgccaagcctcctaggccatta

SEQ ID NO: 3800 - DNA, 469 bp, Mus musculus; identical to SEQ ID NO: 3799
  misc_feature (213)..(213): n is a, c, g, or t
  misc_feature (220)..(220): n is a, c, g, or t

SEQ ID NO: 3801 - DNA, 381 bp, Mus musculus
  misc_feature (225)..(225): n is a, c, g, or t
  misc_feature (235)..(235): n is a, c, g, or t
  misc_feature (237)..(237): n is a, c, g, or t
  misc_feature (242)..(242): n is a, c, g, or t
  misc_feature (261)..(261): n is a, c, g, or t
  misc_feature (305)..(305): n is a, c, g, or t
  misc_feature (307)..(307): n is a, c, g, or t
  misc_feature (309)..(309): n is a, c, g, or t
  misc_feature (319)..(319): n is a, c, g, or t
  misc_feature (349)..(349): n is a, c, g, or t
gcccctaggaactgaacagggccttccccaggtctctggctggctgttacaagcttgcatgatgggctgtgtgtccagtctccatcatgagacacacctcctggggagtcacacattcagcagatggtgaacgagcactgtaaggtccagaccctggtcctggtctgaggaactagtgtggagcaagacagataaagccccgccttcaggaactaaagagactanagatggagcngnggagntggtgggggattacaggtnacatttgggtaaagacctgaagagactaacgcctgccctgctcntntntggagtttcnaggcaggggacagagcacatgcagggccancctgaggtagagggagctaactcctggtacct

SEQ ID NO: 3802 - DNA, 381 bp, Mus musculus; identical to SEQ ID NO: 3801
  misc_feature (225)..(225): n is a, c, g, or t
  misc_feature (235)..(235): n is a, c, g, or t
  misc_feature (237)..(237): n is a, c, g, or t
  misc_feature (242)..(242): n is a, c, g, or t
  misc_feature (261)..(261): n is a, c, g, or t
  misc_feature (305)..(305): n is a, c, g, or t
  misc_feature (307)..(307): n is a, c, g, or t
  misc_feature (309)..(309): n is a, c, g, or t
  misc_feature (319)..(319): n is a, c, g, or t
  misc_feature (349)..(349): n is a, c, g, or t

SEQ ID NO: 3803 - DNA, 480 bp, Mus musculus
  misc_feature (47)..(47): n is a, c, g, or t
  misc_feature (50)..(56): n is a, c, g, or t
  misc_feature (59)..(59): n is a, c, g, or t
actctcatgtgtagggttcacaataaatgttcattaaagtaccaaanaannnnnnnaancatttacagttattgtaagtagccattatggcccaagtgagaattagatgaaagtttaaagtaagcatacttagcattctggatttagatagactaatgtaactacaaaatgggtgctcttttaacccgctgactttgtgaatggatttcaataatagtataaagtagaaggcatgcaatggggatgagcaggtttggctaaccagtgtttccttccgcctggcagaagtcgtagactgcttgtctcacctctctcattcctgctcaatgattatcttttttcccacacacaaaaggaatacttgaaaatacaagactaaatgatattactgcatcagacaaaatacatcatcatcttttcagtcataggctaattgtcttggtctaatatcctttccaaaaagtaccttgcatacttgtg

SEQ ID NO: 3804 - DNA, 480 bp, Mus musculus; identical to SEQ ID NO: 3803
  misc_feature (47)..(47): n is a, c, g, or t
  misc_feature (50)..(56): n is a, c, g, or t
  misc_feature (59)..(59): n is a, c, g, or t

SEQ ID NO: 3805 - DNA, 388 bp, Mus musculus
  misc_feature (130)..(130): n is a, c, g, or t
  misc_feature (132)..(132): n is a, c, g, or t
  misc_feature (134)..(135): n is a, c, g, or t
  misc_feature (138)..(139): n is a, c, g, or t
  misc_feature (141)..(144): n is a, c, g, or t
  misc_feature (146)..(149): n is a, c, g, or t
  misc_feature (153)..(326): n is a, c, g, or t
  misc_feature (328)..(344): n is a, c, g, or t
  misc_feature (359)..(359): n is a, c, g, or t
ttctgtgtggtggtaactacagcctggaacatctcctggtttatgacctagagacatgcaagagggcagtctgaggagttcatggttgttaccatcaataccctaactgcctagatccagcaggtatagncnannaannannnnannnncagnnnnnnnnnnnnnnnnnnnnnnnnnnnnnnnnnnnnnnnnnnnnnnnnnnnnnnnnnnnnnnnnnnnnnnnnnnnnnnnnnnnnnnnnnnnnnnnnnnnnnnnnnnnnnnnnnnnnnnnnnnnnnnnnnnnnnnnnnnnnnnnnnnnnnnnnnnnnnnnnnnnnnnnnnnnnnntnnnnnnnnnnnnnnnnngagagagagagagantgagaatatgattcatcagatcaggctgg

SEQ ID NO: 3806 - DNA, 388 bp, Mus musculus; identical to SEQ ID NO: 3805
  misc_feature (130)..(130): n is a, c, g, or t
  misc_feature (132)..(132): n is a, c, g, or t
  misc_feature (134)..(135): n is a, c, g, or t
  misc_feature (138)..(139): n is a, c, g, or t
  misc_feature (141)..(144): n is a, c, g, or t
  misc_feature (146)..(149): n is a, c, g, or t
  misc_feature (153)..(326): n is a, c, g, or t
  misc_feature (328)..(344): n is a, c, g, or t
  misc_feature (359)..(359): n is a, c, g, or t

SEQ ID NO: 3807 - DNA, 264 bp, Mus musculus
  misc_feature (36)..(36): n is a, c, g, or t
  misc_feature (149)..(166): n is a, c, g, or t
gaagaacaacgaaagcctcaaagcctgtgttcgctntaatttccctgcaaaatatgaccactatttagagcgagcagtctgcaaacgggaaagctgtcaatttgaatattgtacaaagtgtctgtgtgcttaccataacaacaaagacnnnnnnnnnnnnnnnnnnctaaaagccagctgtaaagtgggtcctttgcctggaactaaaaagagtaaaaagaacttacaaagattgtgatagatcaactgtagatcttggctact

SEQ ID NO: 3808 - DNA, 264 bp, Mus musculus; identical to SEQ ID NO: 3807
  misc_feature (36)..(36): n is a, c, g, or t
  misc_feature (149)..(166): n is a, c, g, or t

SEQ ID NO: 3809 - DNA, 99 bp, Mus musculus
gctcttagccctgtgagagaaaagcttcaagcgccacctgctggcctggatggctgggaggatatggggacctgcaacagtggtccacagcagtggctg

SEQ ID NO: 3810 - DNA, 99 bp, Mus musculus; identical to SEQ ID NO: 3809

SEQ ID NO: 3811 - DNA, 114 bp, Mus musculus
tgtgctttacacagttgcctataaaaagtctatgttatccaagcaattcactctagaagcttcggtctcgttgttgtatgcaatttttactatcatgcaaataagcttaggtaa

SEQ ID NO: 3812 - DNA, 114 bp, Mus musculus; identical to SEQ ID NO: 3811

SEQ ID NO: 3813 - DNA, 606 bp, Mus musculus
  misc_feature (47)..(47): n is a, c, g, or t
  misc_feature (56)..(56): n is a, c, g, or t
  misc_feature (78)..(78): n is a, c, g, or t
  misc_feature (347)..(347): n is a, c, g, or t
  misc_feature (370)..(370): n is a, c, g, or t
  misc_feature (376)..(376): n is a, c, g, or t
  misc_feature (405)..(405): n is a, c, g, or t
  misc_feature (407)..(407): n is a, c, g, or t
  misc_feature (423)..(423): n is a, c, g, or t
  misc_feature (462)..(462): n is a, c, g, or t
  misc_feature (475)..(475): n is a, c, g, or t
  misc_feature (484)..(485): n is a, c, g, or t
  misc_feature (494)..(494): n is a, c, g, or t
  misc_feature (514)..(514): n is a, c, g, or t
  misc_feature (525)..(525): n is a, c, g, or t
tcattattacatgattttttttttaaggaaaagaaaatgtgaaacancaatttagntccttgttatttatttgtagcntcctgcagcatcatgtcataattaagttttttggagatttctgttaaatgtaatgttgctttcccatcctgatttcctttctatttataactgtattttgatgggcagtaaaacaaagtgtcttaaaagttttaaatagagaaaaatgtgctttacacagttgcctataaaaagtctatgttatccaagcaattcactctagaagcttcggtctcgttgttgtatgcaatttttactatcatgcaaataagcttaggtaaataaaactnatagatcaccttagaaaattatncaattnatgtgaaaataattgatgtttgcaatgtntnttcctttggtttacantcaattttaaagcgacatctgtataaagtttctgtatanaggtgtatttctnttttatgannttatggctntgaaaacaccagctattttnttacagctgcngtttttataagtgtatcacagttttctttatgcagaaatgtgctgattaggagtggttattgactgtaagtacacgattaa

SEQ ID NO: 3814 - DNA, 606 bp, Mus musculus; identical to SEQ ID NO: 3813
  misc_feature (47)..(47): n is a, c, g, or t
  misc_feature (56)..(56): n is a, c, g, or t
  misc_feature (78)..(78): n is a, c, g, or t
  misc_feature (347)..(347): n is a, c, g, or t
  misc_feature (370)..(370): n is a, c, g, or t
  misc_feature (376)..(376): n is a, c, g, or t
  misc_feature (405)..(405): n is a, c, g, or t
  misc_feature (407)..(407): n is a, c, g, or t
  misc_feature (423)..(423): n is a, c, g, or t
  misc_feature (462)..(462): n is a, c, g, or t
  misc_feature (475)..(475): n is a, c, g, or t
  misc_feature (484)..(485): n is a, c, g, or t
  misc_feature (494)..(494): n is a, c, g, or t
  misc_feature (514)..(514): n is a, c, g, or t
  misc_feature (525)..(525): n is a, c, g, or t

SEQ ID NO: 3815 - DNA, 570 bp, Mus musculus
  misc_feature (26)..(40): n is a, c, g, or t
  misc_feature (65)..(65): n is a, c, g, or t
  misc_feature (71)..(71): n is a, c, g, or t
  misc_feature (223)..(223): n is a, c, g, or t
  misc_feature (294)..(294): n is a, c, g, or t
  misc_feature (332)..(332): n is a, c, g, or t
  misc_feature (341)..(341): n is a, c, g, or t
  misc_feature (350)..(374): n is a, c, g, or t
  misc_feature (376)..(376): n is a, c, g, or t
  misc_feature (430)..(430): n is a, c, g, or t
  misc_feature (485)..(485): n is a, c, g, or t
  misc_feature (500)..(500): n is a, c, g, or t
tcctatggagttcatgaagtgaaccnnnnnnnnnnnnnnncgggcccaggacttagcaaggggcnagagcnaagaatcagcgtgatgatttctgggggtccctggcccaataggctctccaagacgtgtttccactacctgggtgagtttggagaggaccagatctatgaagcctaccgccaaggccaagcgaatctggaggcgctgctctgtgggggcaccnatgggccctgctcacaggagatcctggcccagagagaagagctttagtccaacctgctgcacttctggatnttctctaattttattattattaatggctgattagaggnaggctctcntcatgtagnnnnnnnnnnnnnnnnnnnnnnnnncntgctcagcctcgaaagtgctgcatttaagtcctgagcctttttgtgcttgaccntcctatataattttttcaactgtggtggtggggaggggacagggaagcctgactntagctgtcaatcttntccctccacctctcgatggggtactgggactgaggctgcctttctactttcaaataaagctttgagagac

SEQ ID NO: 3816 - DNA, 570 bp, Mus musculus; identical to SEQ ID NO: 3815
  misc_feature (26)..(40): n is a, c, g, or t
  misc_feature (65)..(65): n is a, c, g, or t
  misc_feature (71)..(71): n is a, c, g, or t
  misc_feature (223)..(223): n is a, c, g, or t
  misc_feature (294)..(294): n is a, c, g, or t
  misc_feature (332)..(332): n is a, c, g, or t
  misc_feature (341)..(341): n is a, c, g, or t
  misc_feature (350)..(374): n is a, c, g, or t
  misc_feature (376)..(376): n is a, c, g, or t
  misc_feature (430)..(430): n is a, c, g, or t
  misc_feature (485)..(485): n is a, c, g, or t
  misc_feature (500)..(500): n is a, c, g, or t

SEQ ID NO: 3817 - DNA, 582 bp, Mus musculus
  misc_feature (26)..(26): n is a, c, g, or t
  misc_feature (317)..(334): n is a, c, g, or t
  misc_feature (349)..(363): n is a, c, g, or t
  misc_feature (455)..(455): n is a, c, g, or t
  misc_feature (496)..(497): n is a, c, g, or t
  misc_feature (500)..(502): n is a, c, g, or t
  misc_feature (504)..(509): n is a, c, g, or t
tagcatgctccaggaaatgcacactntggtgagaatgttatcagtacagtattttgtatttattgaaatgtttcaggggctgatagggatgagttagcctttaagagcatcttctgctccttccaaaggacattgagttggcctttaagagcatttgctttttagcaccacgtcacagggctcacaactgcatgtgactctagttacaggagacacacttgtacacataaaaataaagcttaaatatttttctagtctttttttttccaaaaaaaaaaaaacttttgttgtatatcatgtttacccagaactgttannnnnnnnnnnnnnnnnntttgaatgtttaaannnnnnnnnnnnnnnttccacattcaccgtcattagctcctgcttgagagtccatctcttggcttgtttttaaattttactctacaaaagcaagcagtgagcagagnattgagcaatgtggaatggcggcctaattacatgaactgcnnacnnntnnnnnntacatatgaaaaatgctcacaggaatagaaagtgcattttattacatttgtgacacttcttaaagcaatcatg

SEQ ID NO: 3818 - DNA, 582 bp, Mus musculus; identical to SEQ ID NO: 3817
  misc_feature (26)..(26): n is a, c, g, or t
  misc_feature (317)..(334): n is a, c, g, or t
  misc_feature (349)..(363): n is a, c, g, or t
  misc_feature (455)..(455): n is a, c, g, or t
  misc_feature (496)..(497): n is a, c, g, or t
  misc_feature (500)..(502): n is a, c, g, or t
  misc_feature (504)..(509): n is a, c, g, or t

SEQ ID NO: 3819 - DNA, 514 bp, Mus musculus
  misc_feature (143)..(143): n is a, c, g, or t
  misc_feature (149)..(149): n is a, c, g, or t
  misc_feature (172)..(172): n is a, c, g, or t
  misc_feature (188)..(188): n is a, c, g, or t
  misc_feature (200)..(200): n is a, c, g, or t
  misc_feature (236)..(236): n is a, c, g, or t
  misc_feature (293)..(293): n is a, c, g, or t
  misc_feature (304)..(304): n is a, c, g, or t
  misc_feature (318)..(318): n is a, c, g, or t
  misc_feature (332)..(332): n is a, c, g, or t
  misc_feature (344)..(344): n is a, c, g, or t
tgttctgcctctaagacgttgaagaaaaagctgtggtgtttgggctacctttattgtgatggccttcttatcctcctaataatattgccaagtagggtagattccacacgattgctcttaacccttggtattagcaaatcatntaggtnctaataacgaatattggatacantcaatacaggaatatnaaatggaatgtnaaagcctgttgctatgaatggttagccatctacatnttgtacaaggaatgttgatgttatgaagtgtggaaacttggtattgaagatgtgaantcaaagctttntggattttttgatnccatgataaaaatntgaataaaactnttccttaccatgacggtggggataccagtttctgttaaactgttatttctgatgccaacagcatttcccagtgggatttagatgctagctagtacttgcactttgtatttaagagctgttcgattttgttgttgaaggagtagaacacaaattagttttgtgctgccaaa

SEQ ID NO: 3820 - DNA, 514 bp, Mus musculus; identical to SEQ ID NO: 3819
  misc_feature (143)..(143): n is a, c, g, or t
  misc_feature (149)..(149): n is a, c, g, or t
  misc_feature (172)..(172): n is a, c, g, or t
  misc_feature (188)..(188): n is a, c, g, or t
  misc_feature (200)..(200): n is a, c, g, or t
  misc_feature (236)..(236): n is a, c, g, or t
  misc_feature (293)..(293): n is a, c, g, or t
  misc_feature (304)..(304): n is a, c, g, or t
  misc_feature (318)..(318): n is a, c, g, or t
  misc_feature (332)..(332): n is a, c, g, or t
  misc_feature (344)..(344): n is a, c, g, or t

SEQ ID NO: 3821 - DNA, 466 bp, Mus musculus
  misc_feature (75)..(75): n is a, c, g, or t
  misc_feature (115)..(115): n is a, c, g, or t
  misc_feature (159)..(159): n is a, c, g, or t
  misc_feature (199)..(199): n is a, c, g, or t
  misc_feature (369)..(373): n is a, c, g, or t
  misc_feature (375)..(376): n is a, c, g, or t
attcgggcacagaggggcagaccatcattgaagagaagagccttgttgatactgtctatgccttgaaggatgagntcaaggaactgaagcaggagaataaaaaaatgaagcaatntctggaagaagaattgaagtcgaggaaggacctagagaagctgntccggaagctgttgaaacaaacagatgaatgcattcgatntgaatccagcagcaagacctcgattctccagtaaccatcactgtgcagctgagcacagtgccttcagcactccttaaagtggccagctgaatggtttcactgtgcatttgagctttgtgctttgtggtgttgggatgctctctctttcttcctctctcccttcccctccnnnnncnncctccactgtttgattcagagtttattgcttggttatcagttgattgacacttgttttaacagggggaaatagcctgacgtggtggccaa

SEQ ID NO: 3822 - DNA, 466 bp, Mus musculus; identical to SEQ ID NO: 3821
  misc_feature (75)..(75): n is a, c, g, or t
  misc_feature (115)..(115): n is a, c, g, or t
  misc_feature (159)..(159): n is a, c, g, or t
  misc_feature (199)..(199): n is a, c, g, or t
  misc_feature (369)..(373): n is a, c, g, or t
  misc_feature (375)..(376): n is a, c, g, or t

SEQ ID NO: 3823 - DNA, 558 bp, Mus musculus
  misc_feature (37)..(52): n is a, c, g, or t
  misc_feature (64)..(64): n is a, c, g, or t
  misc_feature (69)..(87): n is a, c, g, or t
  misc_feature (366)..(366): n is a, c, g, or t
  misc_feature (382)..(382): n is a, c, g, or t
  misc_feature (394)..(394): n is a, c, g, or t
  misc_feature (398)..(398): n is a, c, g, or t
  misc_feature (422)..(422): n is a, c, g, or t
  misc_feature (427)..(427): n is a, c, g, or t
  misc_feature (452)..(452): n is a, c, g, or t
  misc_feature (510)..(510): n is a, c, g, or t
  misc_feature (533)..(533): n is a, c, g, or t
cgtccacgcgccaagacggcagggacagaacgacggnnnnnnnnnnnnnnnncaggtgtgcctnctcannnnnnnnnnnnnnnnnnncagtgcaggggaggtggcggcgaccataggaaagaggtggccggccctccatttaacttctaatatctgggttagcattacatgatgtgttgatcttatgctcagcatttgtctaagatgcaatagtatcattatcaatttcagaaatatggactgaatatgcttttttggtgatgaaatctatgtacgatatttatagtgatgtgcttttattttctcatgagaaactaaatattgtgttgtacatttgtttttagcatatattaaagttttaaaccnaatgtgttaaagcttntgctttgccatncaantcccccagaagttggtgagctcanatgtntcctacatccagctgtagaaacttntcagaaattgtttaaattttgtatataggtgactgtttaattttagccactgcgctgnacagtattcaagttatataatanggctttacacaagaaatgtgtggct

SEQ ID NO: 3824 - DNA, 558 bp, Mus musculus; identical to SEQ ID NO: 3823
  misc_feature (37)..(52): n is a, c, g, or t
  misc_feature (64)..(64): n is a, c, g, or t
  misc_feature (69)..(87): n is a, c, g, or t
  misc_feature (366)..(366): n is a, c, g, or t
  misc_feature (382)..(382): n is a, c, g, or t
  misc_feature (394)..(394): n is a, c, g, or t
  misc_feature (398)..(398): n is a, c, g, or t
  misc_feature (422)..(422): n is a, c, g, or t
  misc_feature (427)..(427): n is a, c, g, or t
  misc_feature (452)..(452): n is a, c, g, or t
  misc_feature (510)..(510): n is a, c, g, or t
  misc_feature (533)..(533): n is a, c, g, or t

SEQ ID NO: 3825 - DNA, 526 bp, Mus musculus
  misc_feature (63)..(64): n is a, c, g, or t
  misc_feature (68)..(68): n is a, c, g, or t
  misc_feature (75)..(75): n is a, c, g, or t
  misc_feature (77)..(77): n is a, c, g, or t
  misc_feature (80)..(80): n is a, c, g, or t
  misc_feature (85)..(85): n is a, c, g, or t
  misc_feature (87)..(88): n is a, c, g, or t
  misc_feature (91)..(91): n is a, c, g, or t
  misc_feature (93)..(98): n is a, c, g, or t
  misc_feature (103)..(104): n is a, c, g, or t
  misc_feature (376)..(376): n is a, c, g, or t
  misc_feature (385)..(385): n is a, c, g, or t
  misc_feature (388)..(388): n is a, c, g, or t
  misc_feature (399)..(399): n is a, c, g, or t
ttctctatggaagtatgcatatcggtgtcagtttctttgtacaggtaaacttagatatttttnntganttttcangngcnagtancnnggntnnnnnnttttnntaaaaaaaataaatattctgtagattacattcccaagaaaataatgcttacacaaaatgtatattccacgttttaaagctgaaatgtattttattttacacacttcagttgacatagagcacttagaattaatctggtattttttgatttctcaaagttaaaatcatagattttttaggtttgatatggttgtgtcataatcatctcataattgacaattttgctttttggcaataaaagaaagttgggatatctttgaactgtaaaacctngtttaattnttntctttctggantcttgatagattggataattaaacagtatcccaagaaactaaagaaatgggcattttaattgcttacttacgttacatttaagtgaatactgctcacgacagttttaccaagcgaaagagcttactg

SEQ ID NO: 3826 - DNA, 526 bp, Mus musculus; identical to SEQ ID NO: 3825
  misc_feature (63)..(64): n is a, c, g, or t
  misc_feature (68)..(68): n is a, c, g, or t
  misc_feature (75)..(75): n is a, c, g, or t
  misc_feature (77)..(77): n is a, c, g, or t
  misc_feature (80)..(80): n is a, c, g, or t
  misc_feature (85)..(85): n is a, c, g, or t
  misc_feature (87)..(88): n is a, c, g, or t
  misc_feature (91)..(91): n is a, c, g, or t
  misc_feature (93)..(98): n is a, c, g, or t
  misc_feature (103)..(104): n is a, c, g, or t
  misc_feature (376)..(376): n is a, c, g, or t
  misc_feature (385)..(385): n is a, c, g, or t
  misc_feature (388)..(388): n is a, c, g, or t
  misc_feature (399)..(399): n is a, c, g, or t

SEQ ID NO: 3827 - DNA, 462 bp, Mus musculus
  misc_feature (121)..(126): n is a, c, g, or t
  misc_feature (130)..(147): n is a, c, g, or t
  misc_feature (156)..(157): n is a, c, g, or t
  misc_feature (167)..(167): n is a, c, g, or t
  misc_feature (215)..(215): n is a, c, g, or t
  misc_feature (227)..(247): n is a, c, g, or t
  misc_feature (273)..(273): n is a, c, g, or t
  misc_feature (345)..(345): n is a, c, g, or t
  misc_feature (379)..(379): n is a, c, g, or t
  misc_feature (384)..(384): n is a, c, g, or t
  misc_feature (393)..(394): n is a, c, g, or t
cccaaaaaagcctgtagaacatgcaagaaaaagtttcactcagcttgcctgtacaaatggtttacatctagcaacaagtccacttgcccgctctgccgtgagacctttttctgaggttttnnnnnnttgnnnnnnnnnnnnnnnnnngtcaagccnnagggaatggnttggctccaccttgaagtactgatgtgaagccagtgagcatgacaaantgccatctgtcnnnnnnnnnnnnnnnnnnnnnaacctctgcagattgctttgtaaatnttcggaaacttttttcttttacaagagactattacatatttgagagaaaatatttatattaatggcttaatntctttgtatgtttaaaattaaaaataaatatatntcttntcaaaaatnntctagattatagaactgagatttgtgagagcataaactatattatggctgataagaccatccagtttg

SEQ ID NO: 3828 - DNA, 462 bp, Mus musculus; identical to SEQ ID NO: 3827
  misc_feature (121)..(126): n is a, c, g, or t
  misc_feature (130)..(147): n is a, c, g, or t
  misc_feature (156)..(157): n is a, c, g, or t
  misc_feature (167)..(167): n is a, c, g, or t
  misc_feature (215)..(215): n is a, c, g, or t
  misc_feature (227)..(247): n is a, c, g, or t
  misc_feature (273)..(273): n is a, c, g, or t
  misc_feature (345)..(345): n is a, c, g, or t
  misc_feature (379)..(379): n is a, c, g, or t
  misc_feature (384)..(384): n is a, c, g, or t
  misc_feature (393)..(394): n is a, c, g, or t

SEQ ID NO: 3829 - DNA, 618 bp, Mus musculus
  misc_feature (30)..(30): n is a, c, g, or t
  misc_feature (106)..(106): n is a, c, g, or t
  misc_feature (184)..(184): n is a, c, g, or t
  misc_feature (229)..(229): n is a, c, g, or t
  misc_feature (306)..(306): n is a, c, g, or t
  misc_feature (356)..(357): n is a, c, g, or t
  misc_feature (360)..(361): n is a, c, g, or t
  misc_feature (363)..(368): n is a, c, g, or t
  misc_feature (411)..(412): n is a, c, g, or t
  misc_feature (437)..(437): n is a, c, g, or t
  misc_feature (495)..(498): n is a, c, g, or t
  misc_feature (501)..(520): n is a, c, g, or t
  misc_feature (522)..(524): n is a, c, g, or t
  misc_feature (526)..(538): n is a, c, g, or t
  misc_feature (540)..(543): n is a, c, g, or t
  misc_feature (561)..(561): n is a, c, g, or t
agcagcagcagcacaccttgtaaactattntttttctccacgttgtttatatggcaaaggaaccctttcagctgccaattttgaatgatgaatatcatactgtatnaccgatgttgatatttaaccaagtttgtcttcaggtataagtttaatgaatgtacatcactacttgtcctgaaacatntcgcattttattttgctgcccacattgaaacatttttctgttccntccctataagtgacagcgaatcaattcatcctaagtaggcccctttctgtcattatcattgattttatttgtgcatnttcaataaagttttatgttaatgctggaaagaaacaacagaagaagaaannaannannnnnncttttggtttataatctagttgtagagacaagaaacatacaannaaaaaaaaccacccaaaacaccccnacaaaactcaagattatttagagcatacattctgatagatgtgtgccttcaggacaannnnggnnnnnnnnnnnnnnnnnnnnannncnnnnnnnnnnnnnannnnttcagggaggacagagcnatcgaaagggagccctgaatggggtagagaagttagttgcattccatgagaccgggg

SEQ ID NO: 3830 - DNA, 618 bp, Mus musculus; identical to SEQ ID NO: 3829
  misc_feature (30)..(30): n is a, c, g, or t
  misc_feature (106)..(106): n is a, c, g, or t
  misc_feature (184)..(184): n is a, c, g, or t
  misc_feature (229)..(229): n is a, c, g, or t
  misc_feature (306)..(306): n is a, c, g, or t
  misc_feature (356)..(357): n is a, c, g, or t
  misc_feature (360)..(361): n is a, c, g, or t
  misc_feature (363)..(368): n is a, c, g, or t
  misc_feature (411)..(412): n is a, c, g, or t
  misc_feature (437)..(437): n is a, c, g, or t
  misc_feature (495)..(498): n is a, c, g, or t
  misc_feature (501)..(520): n is a, c, g, or t
  misc_feature (522)..(524): n is a, c, g, or t
  misc_feature (526)..(538): n is a, c, g, or t
  misc_feature (540)..(543): n is a, c, g, or t
  misc_feature (561)..(561): n is a, c, g, or t

SEQ ID NO: 3831 - DNA, 149 bp, Mus musculus
  misc_feature (34)..(34): n is a, c, g, or t
  misc_feature (42)..(42): n is a, c, g, or t
  misc_feature (45)..(45): n is a, c, g, or t
gccatgttcagaagactgcccctgcctgctgttntgtcctgntcntcctttgtttcaagcgtaggtcactacaatactgaaatctaactgtggagattcagaatttgttcccatgttgctaccccttctgtgtttcagagtaataaagc

SEQ ID NO: 3832 - DNA, 149 bp, Mus musculus; identical to SEQ ID NO: 3831
  misc_feature (34)..(34): n is a, c, g, or t
  misc_feature (42)..(42): n is a, c, g, or t
  misc_feature (45)..(45): n is a, c, g, or t

SEQ ID NO: 3833 - DNA, 420 bp, Mus musculus
  misc_feature (56)..(56): n is a, c, g, or t
  misc_feature (305)..(305): n is a, c, g, or t
  misc_feature (334)..(357): n is a, c, g, or t
  misc_feature (365)..(365): n is a, c, g, or t
  misc_feature (395)..(395): n is a, c, g, or t
ctgtccatggttagaatagacaaactgggagaggctatatataaacccctagcaantgtgtttaacactgctatttacattagtttttttccttaactctgatatccttcagttagtaagttatagttttcctgaattgcagtatctccattgtaatgtactgagacctgtaccttttacttgatgaccatttttctagaaagaatggttcatttgttctaaggaaacttagagattgatttgaggaaagtgcagacatcagttaagatgactaagctgatctttagacacattggtaatgtgantgaaagtgtgtgatagattaactggaatnnnnnnnnnnnnnnnnnnnnnnnnaaggaatntggatcttattatcatactttaattcatantctgccgtgtcaagctgcttttata

SEQ ID NO: 3834 - DNA, 420 bp, Mus musculus; identical to SEQ ID NO: 3833
  misc_feature (56)..(56): n is a, c, g, or t
  misc_feature (305)..(305): n is a, c, g, or t
  misc_feature (334)..(357): n is a, c, g, or t
  misc_feature (365)..(365): n is a, c, g, or t
  misc_feature (395)..(395): n is a, c, g, or t

SEQ ID NO: 3835 - DNA, 547 bp, Mus musculus
  misc_feature (75)..(202): n is a, c, g, or t
  misc_feature (272)..(272): n is a, c, g, or t
  misc_feature (274)..(274): n is a, c, g, or t
  misc_feature (372)..(373): n is a, c, g, or t
  misc_feature (397)..(397): n is a, c, g, or t
  misc_feature (476)..(476): n is a, c, g, or t
  misc_feature (490)..(490): n is a, c, g, or t
cttaaaaggaccagggacctcagagtcctcaatgtagttgtgttcaggagtgggcttttgttttgttttttagtnnnnnnnnnnnnnnnnnnnnnnnnnnnnnnnnnnnnnnnnnnnnnnnnnnnnnnnnnnnnnnnnnnnnnnnnnnnnnnnnnnnnnnnnnnnnnnnnnnnnnnnnnnnnnnnnnnnnnnnnnnnnnnnncagctcaggagttgtttttatattccctgaaactattacctgctatgtgaagtgttttaacacaataacntntttcaatatataatgttggctttaagagtcaaatgcctaatcatttttagatttgtgattttaagttgggaagtattttatactttactattgatgtnnaaataatgaattgttgctgggaantagtcatttttgtttaatttattatgttaattcagatttctacatatggaaaaggattgcttgtttccagtcaaatttnttaaatgtctgtgntcttaagttgctgaagcaactgatgttaaatgggaccattagaaacactgctgattt

SEQ ID NO: 3836 - DNA, 547 bp, Mus musculus; identical to SEQ ID NO: 3835
  misc_feature (75)..(202): n is a, c, g, or t
  misc_feature (272)..(272): n is a, c, g, or t
  misc_feature (274)..(274): n is a, c, g, or t
  misc_feature (372)..(373): n is a, c, g, or t
  misc_feature (397)..(397): n is a, c, g, or t
  misc_feature (476)..(476): n is a, c, g, or t
  misc_feature (490)..(490): n is a, c, g, or t

SEQ ID NO: 3837 - DNA, 374 bp, Mus musculus
gcagggacaaactacctcccaaggccctgggcttcctctgagatagcaggtctgcttttctgctcttggcagtgagtagcacggtgcttgtcgtgtttcatgtccacaccatggccacgctagtctttgctttgacttcccaaccacaaagaaaggcgccataatcttaaccaaagaaaggtttgcctgctccttaggaagcttgagtcggcaaggcagagagtctgagactgagtgtagtatgtatgtagccatctagagaagaagtttggaagattattgctggcttctgtaagtctccagaatccatttactaagtctgtttcctaagtctctattttggaagctagaattcaattgaactgtgccagtct

SEQ ID NO: 3838 - DNA, 374 bp, Mus musculus; identical to SEQ ID NO: 3837

SEQ ID NO: 3839 - DNA, 315 bp, Mus musculus
atggggctcccagcatgcctttcactcctctcactactgctgggacttttattcaaacacctcccagcctgagtgaggcacccaggatggttaattggaggcaaccttccctctgatttcctatctctgtggggcacctcagaggtagctgaggaaaagggtaggcaggaggaagagaagggaaaggagacacagctattattggtttgcagaggcatttctactgtttccccaacttccatccctcttcatccccctttctcccctcttcttctctggcatggaactcactctgccaacatgatatcttctgag

SEQ ID NO: 3840 - DNA, 315 bp, Mus musculus; identical to SEQ ID NO: 3839

SEQ ID NO: 3841 - DNA, 222 bp, Mus musculus
acacacggcctgagttcctccaattcccccagcctacccccaacccctcttggccccctccttgccccgcaggacgggactccagggggtcccctcccctacacccctgggctgggggagcaggctctaccttgccctcctgcctgggtggggtctcaccctggagcccactggcgcacctgttcctgctgggtttccactgagatctactggagaaagaat

SEQ ID NO: 3842 - DNA, 222 bp, Mus musculus; identical to SEQ ID NO: 3841

SEQ ID NO: 3843 - DNA, 281 bp, Mus musculus
  misc_feature (213)..(213): n is a, c, g, or t
  misc_feature (226)..(226): n is a, c, g, or t
cagtgcttacacaggccctgtctcaggaacatcttaacagatggcaaaaaaaagtgagcagactttacgaatttttctcctatgagtggcaactaaggttcctgttgtttggaaaaaacactagtggtatgtccgctactaattcagtgttggaggaggcaccagccatatagtaggggtgtgtgtgtgtgtgtgtgtgtgtgcgcgcgcgcncgcgcgtgtgtantttgtttaaattctactgtatatcaccatgaaatctgtctgtttgtcttgacaat

SEQ ID NO: 3844 - DNA, 281 bp, Mus musculus; identical to SEQ ID NO: 3843
  misc_feature (213)..(213): n is a, c, g, or t
  misc_feature (226)..(226): n is a, c, g, or t

SEQ ID NO: 3845 - DNA, 223 bp, Mus musculus
  misc_feature (53)..(55): n is a, c, g, or t
  misc_feature (161)..(161): n is a, c, g, or t
agccacaaattctccgaagccacagccaagctatgaggagctggaggaagaannncaggaggatcagtttgatttgacagttggtatcaccgatcctgagaagatcggggatggtatgaatgcctatgtagcctacaaagtcaccacacagacaagcttancgatgttcagaagtaggcagtttgcagtgaaaagaagattcagtgacttcctgggtctttat

SEQ ID NO: 3846 - DNA, 223 bp, Mus musculus; identical to SEQ ID NO: 3845
  misc_feature (53)..(55): n is a, c, g, or t
  misc_feature (161)..(161): n is a, c, g, or t

SEQ ID NO: 3847 - DNA, 421 bp, Mus musculus
  misc_feature (197)..(212): n is a, c, g, or t
gatgttcaccaacagctccatcaagtttgagctggacattgagcccaaggtgttcaagccacagagcggtgcagatgccctgaacgacagccaggacttcccttttcctgagacgccagcaaaagtgtggccacaggatgagtacattgtggagtactcactggaatatggcttcctgcggctatcccaagccacannnnnnnnnnnnnnnnttcctgtcatggtggtcaccctagaccccacgcgggaccagtgctttggggaccgcttcagccgcctattgctggatgagttcctgggctatgatgacatcctcatgtccagtgtaaagggtctggcagagaacgaggagaacaaaggcttcttgaggaatgtggtctctggggagcactaccgctttgtcagcatgtggatggcgcgc

SEQ ID NO: 3848 - DNA, 421 bp, Mus musculus; identical to SEQ ID NO: 3847
  misc_feature (197)..(212): n is a, c, g, or t

SEQ ID NO: 3849 - DNA, 335 bp, Mus musculus
ctgtcttttaagtgagtctatgctgagatcacgcaggatgcttttatgtagaatatagaacgatcaccctcctaccattctcagatggattttctgttacctctgttccttttgttttggttttttatttgtggaaatcattcatattgaaagcttaatatagagtcatgtctatatcgatttggggttatatgaatgtcagatttagtacaacaaatttagaacttcagtgaatacgaatacttttttaacacagaatgtattttaatataaaaatataatgataaagtcatactggtagaaaatattttttggctgtttacgatcattttccc

SEQ ID NO: 3850 - DNA, 335 bp, Mus musculus; identical to SEQ ID NO: 3849

SEQ ID NO: 3851 - DNA, 285 bp, Mus musculus
  misc_feature (102)..(116): n is a, c, g, or t
  misc_feature (129)..(154): n is a, c, g, or t
caattctaagaactcggatagtaaccatcatcttaaagcaaagtagtggatcagggatgctaggtagagaccaccaggaagagaagggggtggggttttccnnnnnnnnnnnnnnngaatccacctatnnnnnnnnnnnnnnnnnnnnnnnnnngtttttctcctgcctcatctctcagcctcaggagaggtattaacagtattatctccatttatatcctcccagctgtcctgagccaaatctgccattggaagtgtcttccctgtattggttctcctttctcg

SEQ ID NO: 3852 - DNA, 285 bp, Mus musculus; identical to SEQ ID NO: 3851
  misc_feature (102)..(116): n is a, c, g, or t
  misc_feature (129)..(154): n is a, c, g, or t

SEQ ID NO: 3853 - DNA, 496 bp, Mus musculus
  misc_feature (39)..(39): n is a, c, g, or t
  misc_feature (63)..(63): n is a, c, g, or t
  misc_feature (68)..(68): n is a, c, g, or t
  misc_feature (91)..(91): n is a, c, g, or t
  misc_feature (105)..(105): n is a, c, g, or t
  misc_feature (126)..(126): n is a, c, g, or t
  misc_feature (139)..(139): n is a, c, g, or t
  misc_feature (143)..(143): n is a, c, g, or t
  misc_feature (157)..(157): n is a, c, g, or t
  misc_feature (160)..(160): n is a, c, g, or t
  misc_feature (163)..(163): n is a, c, g, or t
  misc_feature (166)..(171): n is a, c, g, or t
  misc_feature (186)..(186): n is a, c, g, or t
  misc_feature (259)..(259): n is a, c, g, or t
  misc_feature (403)..(403): n is a, c, g, or t
aatagagctgcatatggtccagctctaccactttgagtnacatcccccagggaatctgaatcngcatnagctgtgttcatcacactagccnagctatggtgccgntctaggtgtctgcctacggantgaatggataagnaaancacacgcacacgcnacncangannnnnncagagaaatggcatnccattcagccacaaaaagaacaaaattatgtcattatcaggaaaatggatgcgtctagatactatgttaagtnaaaataagtcagtctctgaaacataaatagctcttgtttctcctcctgtatgaaagttgaagaaaagaaaacacctgaatatacaagaggagactattagagaagtggaagaggatttaaggagagatgggtgaaaagatggantggggaataaaaaatgtctatagttgtatacatggatggatctgccaatgtaaaacctgctattctgtgtaatcttatccaagtaaaaatggc

SEQ ID NO: 3854 - DNA, 496 bp, Mus musculus; identical to SEQ ID NO: 3853
  misc_feature (39)..(39): n is a, c, g, or t
  misc_feature (63)..(63): n is a, c, g, or t
  misc_feature (68)..(68): n is a, c, g, or t
  misc_feature (91)..(91): n is a, c, g, or t
  misc_feature (105)..(105): n is a, c, g, or t
  misc_feature (126)..(126): n is a, c, g, or t
  misc_feature (139)..(139): n is a, c, g, or t
  misc_feature (143)..(143): n is a, c, g, or t
  misc_feature (157)..(157): n is a, c, g, or t
  misc_feature (160)..(160): n is a, c, g, or t
  misc_feature (163)..(163): n is a, c, g, or t
  misc_feature (166)..(171): n is a, c, g, or t
  misc_feature (186)..(186): n is a, c, g, or t
  misc_feature (259)..(259): n is a, c, g, or t
  misc_feature (403)..(403): n is a, c, g, or t

SEQ ID NO: 3855 - DNA, 339 bp, Mus musculus
  misc_feature (110)..(124): n is a, c, g, or t
  misc_feature (264)..(264): n is a, c, g, or t
actcactataatcagctgtttggtgatgtttgtttccattgcaaccgtgtcatagaaggtgatgtggtctctgctctcaacaaggcctggtgtgtgagctgctttgcctnnnnnnnnnnnnnnnccaaactcacactcaagaataaatttgtggaatttgacatgaagccagtctgtaagaagtgctacgagaaatttcctttggagctgaagaaaagacttaagaaactatctgagaccttaggaaggaaataacttttggtntcttttttctctctcttctaatcaatgttacttaacctgatctacccttgcttaaaactatgtcagagcattaga

SEQ ID NO: 3856 - DNA, 339 bp, Mus musculus; identical to SEQ ID NO: 3855
  misc_feature (110)..(124): n is a, c, g, or t
  misc_feature (264)..(264): n is a, c, g, or t

SEQ ID NO: 3857 - DNA, 341 bp, Mus musculus
  misc_feature (54)..(54): n is a, c, g, or t
  misc_feature (75)..(75): n is a, c, g, or t
  misc_feature (90)..(90): n is a, c, g, or t
  misc_feature (93)..(93): n is a, c, g, or t
  misc_feature (96)..(96): n is a, c, g, or t
  misc_feature (106)..(106): n is a, c, g, or t
  misc_feature (160)..(160): n is a, c, g, or t
  misc_feature (162)..(162): n is a, c, g, or t
  misc_feature (210)..(210): n is a, c, g, or t
  misc_feature (251)..(251): n is a, c, g, or t
ggtcagggacatcaagtggacatcagttttgtctcacgtagagtttggagtganctgtcaattcaaagctgcaanctatcagttgtgggnatnttntgaagcctgnttgcacctagagttatgccacttgctggaaggggaagttgctgtgggagcagtntntcctctttccagggtggtagctccatcctgttgagtagtgagatacantccctgactggtctgtgctgcattacagttacatgatacantagaaccttcccaaactcagcagagccacacagctgcatccagtaccatcaccctgcaaaacacttgtatttccaaaagggaaagcacct

SEQ ID NO: 3858 - DNA, 341 bp, Mus musculus; identical to SEQ ID NO: 3857
  misc_feature (54)..(54): n is a, c, g, or t
  misc_feature (75)..(75): n is a, c, g, or t
  misc_feature (90)..(90): n is a, c, g, or t
  misc_feature (93)..(93): n is a, c, g, or t
  misc_feature (96)..(96): n is a, c, g, or t
  misc_feature (106)..(106): n is a, c, g, or t
  misc_feature (160)..(160): n is a, c, g, or t
  misc_feature (162)..(162): n is a, c, g, or t
  misc_feature (210)..(210): n is a, c, g, or t
  misc_feature (251)..(251): n is a, c, g, or t

SEQ ID NO: 3859 - DNA, 341 bp, Mus musculus
  misc_feature (62)..(62): n is a, c, g, or t
ctaaatttgcatttgaggcaagagctttaccactgagacagaccccaggcatctttttattntctgttttgagcaggtctcactaagttttggctggcctgaaaagttctcaggtctaggcaggccttgaactttgaatgctcttgcctcagcctctcaagtggctgaggttacaggcctcaacagctggaccttaacattttgatatcattgggaaagtattttgaacaagttacttaatagtaagccttaattaatattaagttcatttaataacatggaaaacacctaatgaattcatagcattcccttgtcttaattaatctcctgtggctatagtt

SEQ ID NO: 3860 - DNA, 341 bp, Mus musculus; identical to SEQ ID NO: 3859
  misc_feature (62)..(62): n is a, c, g, or t

SEQ ID NO: 3861 - DNA, 576 bp, Mus musculus
  misc_feature (116)..(130): n is a, c, g, or t
  misc_feature (138)..(138): n is a, c, g, or t
  misc_feature (157)..(157): n is a, c, g, or t
  misc_feature (162)..(162): n is a, c, g, or t
  misc_feature (168)..(168): n is a, c, g, or t
  misc_feature (192)..(192): n is a, c, g, or t
  misc_feature (235)..(235): n is a, c, g, or t
  misc_feature (241)..(241): n is a, c, g, or t
  misc_feature (250)..(250): n is a, c, g, or t
  misc_feature (254)..(254): n is a, c, g, or t
  misc_feature (257)..(259): n is a, c, g, or t
  misc_feature (265)..(265): n is a, c, g, or t
  misc_feature (267)..(267): n is a, c, g, or t
  misc_feature (272)..(272): n is a, c, g, or t
  misc_feature (277)..(279): n is a, c, g, or t
  misc_feature (317)..(393): n is a, c, g, or t
  misc_feature (397)..(400): n is a, c, g, or t
  misc_feature (402)..(403): n is a, c, g, or t
  misc_feature (407)..(409): n is a, c, g, or t
  misc_feature (412)..(414): n is a, c, g, or t
  misc_feature (417)..(417): n is a, c, g, or t
  misc_feature (420)..(420): n is a, c, g, or t
  misc_feature (424)..(424): n is a, c, g, or t
  misc_feature (426)..(426): n is a, c, g, or t
  misc_feature (430)..(430): n is a, c, g, or t
  misc_feature (433)..(439): n is a, c, g, or t
  misc_feature (441)..(441): n is a, c, g, or t
  misc_feature (444)..(444): n is a, c, g, or t
  misc_feature (446)..(452): n is a, c, g, or t
  misc_feature (455)..(456): n is a, c, g, or t
  misc_feature (462)..(480): n is a, c, g, or t
  misc_feature (490)..(490): n is a, c, g, or t
  misc_feature (498)..(498): n is a, c, g, or t
  misc_feature (528)..(528): n is a, c, g, or t
catggattgctgtggacagctatggatagtcatatagccacacacccgggctccatggtcatggggaagaaggcctcctttggacacaaggaatccaggaagtcggctgggcttcnnnnnnnnnnnnnnntggggacnctgcaggctgtgctgtggnatccntggccntcttcagcgacctgggatgggacnaaggtgggaatagacaaggccccacctgcctgccaggtccttntggtgntaggccatngacngcnnnagccancnaactntttannnggaaatgtagtccagaccatatttatataaggtatttnnnnnnnnnnnnnnnnnnnnnnnnnnnnnnnnnnnnnnnnnnnnnnnnnnnnnnnnnnnnnnnnnnnnnnnnnnnnngggnnnncnncaannnggnnnaanggntttntnaaanccnnnnnnntnaangnnnnnnngtnnccccannnnnnnnnnnnnnnnnnnttctgtagantccgtggntccttccaagagcaggtggcctgagggttnttgaatgggaacctcctgtacccctctgtaatgacatgcatgtaatgt

SEQ ID NO: 3862 - DNA, 576 bp, Mus musculus; identical to SEQ ID NO: 3861
  misc_feature (116)..(130): n is a, c, g, or t
  misc_feature (138)..(138): n is a, c, g, or t
  misc_feature (157)..(157): n is a, c, g, or t
  misc_feature (162)..(162): n is a, c, g, or t
  misc_feature (168)..(168): n is a, c, g, or t
  misc_feature (192)..(192): n is a, c, g, or t
  misc_feature (235)..(235): n is a, c, g, or t
  misc_feature (241)..(241): n is a, c, g, or t
  misc_feature (250)..(250): n is a, c, g, or t
  misc_feature (254)..(254): n is a, c, g, or t
  misc_feature (257)..(259): n is a, c, g, or t
  misc_feature (265)..(265): n is a, c, g, or t
  misc_feature (267)..(267): n is a, c, g, or t
  misc_feature (272)..(272): n is a, c, g, or t
  misc_feature (277)..(279): n is a, c, g, or t
  misc_feature (317)..(393): n is a, c, g, or t
  misc_feature (397)..(400): n is a, c, g, or t
  misc_feature (402)..(403): n is a, c, g, or t
  misc_feature (407)..(409): n is a, c, g, or t
  misc_feature (412)..(414): n is a, c, g, or t
  misc_feature (417)..(417): n is a, c, g, or t
  misc_feature (420)..(420): n is a, c, g, or t
  misc_feature (424)..(424): n is a, c, g, or t
  misc_feature (426)..(426): n is a, c, g, or t
  misc_feature (430)..(430): n is a, c, g, or t
  misc_feature (433)..(439): n is a, c, g, or t
  misc_feature (441)..(441): n is a, c, g, or t
  misc_feature (444)..(444): n is a, c, g, or t
  misc_feature (446)..(452): n is a, c, g, or t
  misc_feature (455)..(456): n is a, c, g, or t
  misc_feature (462)..(480): n is a, c, g, or t
  misc_feature (490)..(490): n is a, c, g, or t
  misc_feature (498)..(498): n is a, c, g, or t
  misc_feature (528)..(528): n is a, c, g, or t

SEQ ID NO: 3863 - DNA, 546 bp, Mus musculus
  misc_feature (239)..(253): n is a, c, g, or t
  misc_feature (310)..(340): n is a, c, g, or t
  misc_feature (373)..(373): n is a, c, g, or t
tctgctgatgaatccgtctcttcctcctcctcttcttcctcttctagccacaaacggcataagaaaagtaagaggaatcgttcagagtcttctcgaagttcaaagaggcactggtctaggccatcttcaggccacacagatcaaagtaggaaagatgattgctacccagttccaactaatacctcagcatctttccttaatcaaaagcaagaagtggagaagctgctggaaaagcaggnnnnnnnnnnnnnnncaaatgcacaggtaaaagagaaagagaggggccttctcacatcttcaggtgaagtannnnnnnnnnnnnnnnnnnnnnnnnnnnnnnacaatagctataaaacccaggcaggtagtagcnaaaccgaaaagccatataaatcagaaagacatttctccaggagaaattcctcagattccttctctagaaattcagaggacaagatgaaagcatctagttaccgaagatttgaaaaggacacagagggaagaaaagatcactctaggaggtgggagccaagttctgtgaagtac

SEQ ID NO: 3864 - DNA, 546 bp, Mus musculus; identical to SEQ ID NO: 3863
  misc_feature (239)..(253): n is a, c, g, or t
  misc_feature (310)..(340): n is a, c, g, or t
  misc_feature (373)..(373): n is a, c, g, or t

SEQ ID NO: 3865 - DNA, 580 bp, Mus musculus
  misc_feature (72)..(86): n is a, c, g, or t
  misc_feature (120)..(120): n is a, c, g, or t
  misc_feature (151)..(152): n is a, c, g, or t
  misc_feature (155)..(155): n is a, c, g, or t
  misc_feature (174)..(192): n is a, c, g, or t
  misc_feature (303)..(304): n is a, c, g, or t
ttcctgtttgataagggacacagagtttgtttacctatcctgttgatgcagagagagagaagaatccaggannnnnnnnnnnnnnnggtgtgtccctgtaattacttcagagaaagcagnggatcaggaagggaaggctagcttgaccctnnctnagaaaagaaagaacaagannnnnnnnnnnnnnnnnnnctcattccaaattttaactcaataggtttagcaagatgcaatctacttctgaggccccagtacttataaacgtgaggaaggtggatcttgaatttgaggcctgtgtaggcnnagtaaagtaaaaccctatctcagaataaaacaaaacaaaaccaaaaaacaggttttcattcaacttatatgagtgacagtttttcctttttgaaataaaatttttctcttactggagaaagaaaacatgattcgaggccccgaatgttattagaactcaaaactctagctggtctttcaggctggctcaagagagtaatctcacacttgggtcttgatcaccgacatccctgaccccactacatccccaggtctttctgacaagttgagagagact

SEQ ID NO: 3866 - DNA, 580 bp, Mus musculus; identical to SEQ ID NO: 3865
  misc_feature (72)..(86): n is a, c, g, or t
  misc_feature (120)..(120): n is a, c, g, or t
  misc_feature (151)..(152): n is a, c, g, or t
  misc_feature (155)..(155): n is a, c, g, or t
  misc_feature (174)..(192): n is a, c, g, or t
  misc_feature (303)..(304): n is a, c, g, or t

SEQ ID NO: 3867 - DNA, 460 bp, Mus musculus
  misc_feature (31)..(32): n is a, c, g, or t
  misc_feature (35)..(35): n is a, c, g, or t
  misc_feature (54)..(72): n is a, c, g, or t
  misc_feature (183)..(184): n is a, c, g, or t
ggatcaggaagggaaggctagcttgaccctnnctnagaaaagaaagaacaagannnnnnnnnnnnnnnnnnnctcattccaaattttaactcaataggtttagcaagatgcaatctacttctgaggccccagtacttataaacgtgaggaaggtggatcttgaatttgaggcctgtgtaggcnnagtaaagtaaaaccctatctcagaataaaacaaaacaaaaccaaaaaacaggttttcattcaacttatatgagtgacagtttttcctttttgaaataaaatttttctcttactggagaaagaaaacatgattcgaggccccgaatgttattagaactcaaaactctagctggtctttcaggctggctcaagagagtaatctcacacttgggtcttgatcaccgacatccctgaccccactacatccccaggtctttctgacaagttgagagagact

SEQ ID NO: 3868 - DNA, 481 bp, Mus musculus
  misc_feature (28)..(42): n is a, c, g, or t
  misc_feature (358)..(358): n is a, c, g, or t
tacgtaccttctgaagccttcggggccnnnnnnnnnnnnnnncaaatctgtccaactgaacggtcaaattctgaagatggtggatgagcagaccctgccagctttgacagaaaaacctctccccgcaggaagtgcactaagcctgcctgccttttcctatggtttttttgtcataagaaatgccaaaatcgctgcttgtatatgaaaataaaaggcatacggtacccctgagacaaaagccgaggggggtgttattcataaaacaaaaccctagtttaggaggccacctccttgccgagttccagagcttcgggagggtggggtacacttcagtattacattcagtgtggtgttctcntctaagaagaatactgcaggtggtgacagttaatagcactgtgtggcaaatgacgcttagccctttgcatgcactattttaggggttgtttaaaaatgtataggaatgcctccaatgtgacca

SEQ ID NO: 3869 - DNA, 286 bp, Mus musculus
  misc_feature (55)..(55): n is a, c, g, or t
  misc_feature (119)..(120): n is a, c, g, or t
  misc_feature (236)..(237): n is a, c, g, or t
tctgaaatgtacaagccctggatttgctacagagtgagaagttattttattttantttttttttattttttattttgagaaaactgcagaaatcagaactcctaccatggtttgaaaanngaggcgggaggggaggcgggagggctggtccggcatgcctgtatgtatctctcaagagccttttttttaaaatgtaaaagctgtacatttttgggaagttctgattttctttttcnntttttttttttctttttgtttccttttaccttcaagcattttgcagtgc

SEQ ID NO: 3870 - DNA, 286 bp, Mus musculus; identical to SEQ ID NO: 3869
  misc_feature (55)..(55): n is a, c, g, or t
  misc_feature (119)..(120): n is a, c, g, or t
  misc_feature (236)..(237): n is a, c, g, or t

SEQ ID NO: 3871 - DNA, 67 bp, Mus musculus
tccctaatccaccatggatagaatgggatacctagcccatctgcccaaggatggtgccctacaagtg

SEQ ID NO: 3872 - DNA, 67 bp, Mus musculus; identical to SEQ ID NO: 3871

SEQ ID NO: 3873 - DNA, 354 bp, Mus musculus
  misc_feature (56)..(56): n is a, c, g, or t
  misc_feature (58)..(58): n is a, c, g, or t
  misc_feature (67)..(67): n is a, c, g, or t
  misc_feature (179)..(193): n is a, c, g, or t
  misc_feature (225)..(225): n is a, c, g, or t
cacccagagaaactccaggaggaagaagagagaaggatgctgtggttgccatgggnanggcgagaanggaggagaggaccattatgaagaagctgttctctttccggtcagggaagcatacctagactgaaaaccatcaccaagatggtgaccctcttgacttgagaagacaattgccnnnnnnnnnnnnnnnaccaccttcctgtgtcaggaatgtgccttggnttgctcctgcacagagcagtcagaggaagatgctccctcccatggctcacctgctctctggggacagacctggacagtcagtaagctttggccaggccaaatgaggccaatactgagaactggagaaag

SEQ ID NO: 3874 - DNA, 354 bp, Mus musculus; identical to SEQ ID NO: 3873
  misc_feature (56)..(56): n is a, c, g, or t
  misc_feature (58)..(58): n is a, c, g, or t
  misc_feature (67)..(67): n is a, c, g, or t
  misc_feature (179)..(193): n is a, c, g, or t
  misc_feature (225)..(225): n is a, c, g, or t

SEQ ID NO: 3875 - DNA, 189 bp, Mus musculus
  misc_feature (45)..(45): n is a, c, g, or t
  misc_feature (61)..(61): n is a, c, g, or t
  misc_feature (65)..(65): n is a, c, g, or t
  misc_feature (115)..(115): n is a, c, g, or t
aggccaccaaactgtccacggcagtcctgagcattttcaagtctnactccacttggctcantgangatttcaggttgtctagagaggacagtctgtccaggaagtcctgaggagncaagccctcggcctgggcttggtcctggctgagcagtgagagcacttgctcctgcagtgactccacggtaccgg

SEQ ID NO: 3876 - DNA, 189 bp, Mus musculus; identical to SEQ ID NO: 3875
  misc_feature (45)..(45): n is a, c, g, or t
  misc_feature (61)..(61): n is a, c, g, or t
  misc_feature (65)..(65): n is a, c, g, or t
  misc_feature (115)..(115): n is a, c, g, or t

SEQ ID NO: 3877 - DNA, 591 bp, Mus musculus
  misc_feature (27)..(27): n is a, c, g, or t
  misc_feature (150)..(164): n is a, c, g, or t
  misc_feature (228)..(228): n is a, c, g, or t
  misc_feature (401)..(401): n is a, c, g, or t
  misc_feature (419)..(419): n is a, c, g, or t
  misc_feature (421)..(421): n is a, c, g, or t
  misc_feature (424)..(424): n is a, c, g, or t
  misc_feature (426)..(426): n is a, c, g, or t
  misc_feature (435)..(435): n is a, c, g, or t
  misc_feature (452)..(452): n is a, c, g, or t
gactccagagaaagactttccaatggngaaagataagctatgcacatactgttattgcagatatttattatatatttattacaaagccagaatccaaaaaggttgtgaaaatcgagtctttaatgtcctttgaaggaccgttgtcttacnnnnnnnnnnnnnnntgcttgtttgcattgcgcttgttactgtaaatccagggctgtgcgccagcagccctcctgatantcgtaagttattctgcttgctatatttttcactcttacagaaatgtatacttgtgttgctcaactgtttcagatgtttaaggacttctaatgcacttcgttagcttgtgttgtatattacatgtgtttgaagtggattttttatttatacagatacctgtaaaatatatagtntcaggagtatgaaaagtnanaananatttggttnttttttctaattaattntggaagttggatgcttggactccctcattcagatcaccagtttccacttcctattgtttgtctgagatgagcgtgtgccgtgtctgggccgtttgagatagtttacacggtggggggagcgctgcttttcattacagtg

SEQ ID NO: 3878 - DNA, 591 bp, Mus musculus; identical to SEQ ID NO: 3877
  misc_feature (27)..(27): n is a, c, g, or t
  misc_feature (150)..(164): n is a, c, g, or t
  misc_feature (228)..(228): n is a, c, g, or t
  misc_feature (401)..(401): n is a, c, g, or t
  misc_feature (419)..(419): n is a, c, g, or t
  misc_feature (421)..(421): n is a, c, g, or t
  misc_feature (424)..(424): n is a, c, g, or t
  misc_feature (426)..(426): n is a, c, g, or t
  misc_feature (435)..(435): n is a, c, g, or t
  misc_feature (452)..(452): n is a, c, g, or t

SEQ ID NO: 3879 - DNA, 373 bp, Mus musculus
  misc_feature (117)..(164): n is a, c, g, or t
gtctccaacgtggaagccctctgctcatcaccctggaaataccctgcctcacccgctcctggggtggtctgtgctgggtctttacgtttctattcatctttctcaagcagcctgtgnnnnnnnnnnnnnnnnnnnnnnnnnnnnnnnnnnnnnnnnnnnnnnnngaccctttatgaacagtcagcgggcagcctgcatctgtgcagaggaggagaaagaagagctatgaagagaaggtggctcttccaggctttgaggcacgtcggggctgtttcagagacagctgtgtgacaagagagccgtcctttcttcaaacccttcggaaatcacgagctggaaaagggaggcagcaggccttgtcctttgaggaaag

SEQ ID NO: 3880 - DNA, 373 bp, Mus musculus; identical to SEQ ID NO: 3879
  misc_feature (117)..(164): n is a, c, g, or t

SEQ ID NO: 3881 - DNA, 419 bp, Mus musculus
  misc_feature (26)..(41): n is a, c, g, or t
  misc_feature (210)..(210): n is a, c, g, or t
gacttactatgtctgaagtcgtcagnnnnnnnnnnnnnnnntagaagggactcaggacactaagagctcagccctgtctgtgtctactccaggccaaggtcgagcttggttgtggatgaaggaccaggactctgtagggtttcatcagacctgggtcctccctctgggactgacctagtgggaggagtggagacgggtctgggcaaagcnatacacactctgggaaaagatttccaggctcagcgtggactgtgtgtgagtctcaggcaaactcctcaccttatgacttccttcccaagctctcgaggacatgtgaattccccaccatgacacgacccctttccacacactgtagcatctacctggtttttagtcccaccctacccaccgttgctgtgtctgtcagctgggtctgaaaa

SEQ ID NO: 3882 - DNA, 419 bp, Mus musculus; identical to SEQ ID NO: 3881
  misc_feature (26)..(41): n is a, c, g, or t
  misc_feature (210)..(210): n is a, c, g, or t

SEQ ID NO: 3883 - DNA, 591 bp, Mus musculus
  misc_feature (29)..(29): n is a, c, g, or t
  misc_feature (31)..(31): n is a, c, g, or t
  misc_feature (33)..(42): n is a, c, g, or t
  misc_feature (57)..(57): n is a, c, g, or t
  misc_feature (250)..(251): n is a, c, g, or t
  misc_feature (338)..(338): n is a, c, g, or t
  misc_feature (366)..(366): n is a, c, g, or t
  misc_feature (368)..(372): n is a, c, g, or t
  misc_feature (375)..(375): n is a, c, g, or t
  misc_feature (378)..(379): n is a, c, g, or t
  misc_feature (384)..(384): n is a, c, g, or t
  misc_feature (410)..(411): n is a, c, g, or t
  misc_feature (420)..(420): n is a, c, g, or t
  misc_feature (427)..(427): n is a, c, g, or t
  misc_feature (431)..(431): n is a, c, g, or t
  misc_feature (434)..(434): n is a, c, g, or t
  misc_feature (445)..(445): n is a, c, g, or t
  misc_feature (448)..(448): n is a, c, g, or t
  misc_feature (452)..(452): n is a, c, g, or t
  misc_feature (461)..(464): n is a, c, g, or t
  misc_feature (473)..(473): n is a, c, g, or t
  misc_feature (482)..(482): n is a, c, g, or t
  misc_feature (531)..(531): n is a, c, g, or t
  misc_feature (533)..(533): n is a, c, g, or t
  misc_feature (566)..(566): n is a, c, g, or t
ctgggttctatgacagttgaaagctggtntnannnnnnnnnnggtggcccgcaaganaggcactgaggactaagccactgggatttgagatcctcagcagtctgtggacctcttcctgtcccaggcattgacctctgtgatccatgtctgctctgtgtcatctcccgacttgaattgtcatcatgatgtcagccagcctcggctgcagaacaagttgggtcctgggtcagctggcaaccatcctgatctnnttctatcctgatcctctcagaagcagaaggctgaacccaggagggagtagagagctgatggtgttactcagactcaaccacggtttntgctagagaacctgccctgtgtgatgcngnnnnngtnaanncaaangcagtagaatagacaattgctgggcnnggggcccanacctggncaanagnctttctaaatnttncagnactgtgcannnntgttccttnatgtatganaacctgcccagatggagactgcttaggtgactatgggaggggtaatgantntggggacttgaaggcaatagggcactttgtgtntccacagctttcatccagcaaagtg

SEQ ID NO: 3884 - DNA, 591 bp, Mus musculus; identical to SEQ ID NO: 3883
  misc_feature (29)..(29): n is a, c, g, or t
  misc_feature (31)..(31): n is a, c, g, or t
  misc_feature (33)..(42): n is a, c, g, or t
  misc_feature (57)..(57): n is a, c, g, or t
  misc_feature (250)..(251): n is a, c, g, or t
  misc_feature (338)..(338): n is a, c, g, or t
  misc_feature (366)..(366): n is a, c, g, or t
  misc_feature (368)..(372): n is a, c, g, or t
  misc_feature (375)..(375): n is a, c, g, or t
  misc_feature (378)..(379): n is a, c, g, or t
  misc_feature (384)..(384): n is a, c, g, or t
  misc_feature (410)..(411): n is a, c, g, or t
  misc_feature (420)..(420): n is a, c, g, or t
  misc_feature (427)..(427): n is a, c, g, or t
  misc_feature (431)..(431): n is a, c, g, or t
  misc_feature (434)..(434): n is a, c, g, or t
  misc_feature (445)..(445): n is a, c, g, or t
  misc_feature (448)..(448): n is a, c, g, or t
  misc_feature (452)..(452): n is a, c, g, or t
  misc_feature (461)..(464): n is a, c, g, or t
  misc_feature (473)..(473): n is a, c, g, or t
  misc_feature (482)..(482): n is a, c, g, or t
  misc_feature (531)..(531): n is a, c, g, or t
  misc_feature (533)..(533): n is a, c, g, or t
  misc_feature (566)..(566): n is a, c, g, or t

SEQ ID NO: 3885 - DNA, 460 bp, Mus musculus
  misc_feature (187)..(187): n is a, c, g, or t
acctacgattgtaaactagctgtaaggatttcccagtgaaatcagatttggaaagaaaagagagatagttctccgggatgcatagattcatgatttatctacttttgaaatgtgggcttcttcatctttacgttctagactccaattttgtccaatgtatatagaatctccatattaaagaaatatncataatcagaaagcttgaatattgtttttgcaccagaggagaagtgaggaaattcggagctatacgtgtgtgcagagggttgctacctatgggtttacgcttaattttaattgggagaaagtgagtgcttattgtaatggagttaattttattgataataaattatacaccatgaaactgctcttgggctactgtagatttgtatccttggtgaatttggggttcccatcggattgaacatacactgtatattttgcaatagttacctcaagg

SEQ ID NO: 3886 - DNA, 460 bp, Mus musculus; identical to SEQ ID NO: 3885
  misc_feature (187)..(187): n is a, c, g, or t

SEQ ID NO: 3887 - DNA, 522 bp, Mus musculus
  misc_feature (256)..(259): n is a, c, g, or t
  misc_feature (261)..(261): n is a, c, g, or t
  misc_feature (265)..(265): n is a, c, g, or t
  misc_feature (342)..(342): n is a, c, g, or t
  misc_feature (344)..(344): n is a, c, g, or t
  misc_feature (346)..(347): n is a, c, g, or t
  misc_feature (353)..(354): n is a, c, g, or t
  misc_feature (422)..(422): n is a, c, g, or t
  misc_feature (429)..(429): n is a, c, g, or t
  misc_feature (477)..(477): n is a, c, g, or t
  misc_feature (481)..(481): n is a, c, g, or t
  misc_feature (483)..(483): n is a, c, g, or t
  misc_feature (496)..(496): n is a, c, g, or t
ttatggagcagagcagacagcctgggggtgggcacaccatggcccttatccctctgcctttacttgccaagactccttccttgaaatatacctgagaccatgtccttaacttcccaggaagatttccaaattcctcacactgtgtcaaggtcccaatcagcccccaccatgcatttgctatctccttgtggcccttaccacactgtcctgtagggctatttaccttgtagagggtgcatgcctaggagccgggatnnnngnagangcacaacctgactttgtacctatcaacaaaagaaggcaatagatgcttgttggattataacactcttacaggccctntncnntttgtnntctggatggtggggaagagagttgtggagttggcttctggagagatgacattcaggtatcagaagcanctgagtntcatgtgtgtaggctaaatggaacagatgaagctgagaatggcccttntccntnttctctggtcctntgcaatgtacttttgatcaccatgtc

SEQ ID NO: 3888 - DNA, 522 bp, Mus musculus; identical to SEQ ID NO: 3887
  misc_feature (256)..(259): n is a, c, g, or t
  misc_feature (261)..(261): n is a, c, g, or t
  misc_feature (265)..(265): n is a, c, g, or t
  misc_feature (342)..(342): n is a, c, g, or t
  misc_feature (344)..(344): n is a, c, g, or t
  misc_feature (346)..(347): n is a, c, g, or t
  misc_feature (353)..(354): n is a, c, g, or t
  misc_feature (422)..(422): n is a, c, g, or t
  misc_feature (429)..(429): n is a, c, g, or t
  misc_feature (477)..(477): n is a, c, g, or t
  misc_feature (481)..(481): n is a, c, g, or t
  misc_feature (483)..(483): n is a, c, g, or t
  misc_feature (496)..(496): n is a, c, g, or t

SEQ ID NO: 3889 - DNA, 289 bp, Mus musculus
  misc_feature (147)..(147): n is a, c, g, or t
  misc_feature (231)..(231): n is a, c, g, or t
gtcagtgcgtgacgaatggcacgttaatggtgcgtatgaatatttttcacagtgatcagtgtacatctgatgattatctcaaggtaaaagagacatggcgacgtacgttgggggattgctgcagcgcgtaaggggaggacatggccnattgttgggccccgtggggggaagggcccaaccctaagcgcgcggggagtgcgcggtctggaggggtgagtctccttttgcgcnaaggggttccccaatgggcacggtttgcgtcgtcaattttgcggaaagagtgactaac

SEQ ID NO: 3890 - DNA, 447 bp, Mus musculus
  misc_feature (26)..(26): n is a, c, g, or t
tctggagccacacacagcggctgctncgctccccacccccaagttaagttagggaagccccagcctgggcaggaggagggacgggctggccacatcactgatgccaagccaacctccccactgtctggtttctgtgctccttcatctccacctattgtctgacctgctagaagccacatgaggtcttatcacaccaggcctctgtcactggtagccaggagtgttgggcacagagaggagaggactgggggtgggggtagcatttgtgggtatcatttgttgtcaccccctcccacacacacacaggcatcgagcacactaaatatttgtatatcacctgggtaaggtgatacgttaggtcatggcatctgcatagaggccctggggttcgtggtccagaggacagcaaggagcccacccagcctggtcccagatccgagtctctga

SEQ ID NO: 3891 - DNA, 447 bp, Mus musculus; identical to SEQ ID NO: 3890
  misc_feature (26)..(26): n is a, c, g, or t

SEQ ID NO: 3892 - DNA, 391 bp, Mus musculus
  misc_feature (51)..(51): n is a, c, g, or t
  misc_feature (126)..(149): n is a, c, g, or t
  misc_feature (239)..(239): n is a, c, g, or t
tcccccgtgagtgagtactgtagtcctccatctcaaggcagccttacttcngacacatttcaaactggtgcaaacagaaaagacttctctcttttcttctgaggctaaagacaagaatgtcacgcnnnnnnnnnnnnnnnnnnnnnnnnaaaacagaaaccaatgcagacagagacattttaccccttgatgtagctgtgagtcccaacctagtgccattgtttttatttttatttttntttttggaaatggctttagaactttccaagttatccttgaattgtctgaccacggacatcaacagctgcctcccttctaccatgtagaatcctatgacttaacttttcttccagatatagaggggtacctgcctgtttttcaaagtgtttat

SEQ ID NO: 3893 - DNA, 391 bp, Mus musculus; identical to SEQ ID NO: 3892
  misc_feature (51)..(51): n is a, c, g, or t
  misc_feature (126)..(149): n is a, c, g, or t
  misc_feature (239)..(239): n is a, c, g, or t

SEQ ID NO: 3894 - DNA, 330 bp, Mus musculus
  misc_feature (133)..(133): n is a, c, g, or t
  misc_feature (267)..(305): n is a, c, g, or t
atagatcacgtgacaggtgcctctgctttggaaggacagacaccaggttaagaatatcactgctttctattcaaatggatttcctgagtttccaaatctttcctttcaaatgtattgtggagatagtcaactncaaggccaattttgaacccttggtactgactctggctgctatgaattctgttttactttgactataaatgatcagaataactccagagcactgtggtgtttctgactggttgaaattgatgattgacattaatnnnnnnnnnnnnnnnnnnnnnnnnnnnnnnnnnnnnnnntttcttcactgcagaaccaaaagga

SEQ ID NO: 3895 - DNA, 330 bp, Mus musculus; identical to SEQ ID NO: 3894
  misc_feature (133)..(133): n is a, c, g, or t
  misc_feature (267)..(305): n is a, c, g, or t

SEQ ID NO: 3896 - DNA, 530 bp, Mus musculus
  misc_feature (332)..(332): n is a, c, g, or t
ggcaaacctttcaagatccaacctgccttcatcagaagttctgcagattgtgctgccacccagcccagagaccattcctaacaaacgctccttttgtccttattcagagaagcttccctttccattgaacatcagtgaatgctgagacttatggctatacaaggtgcaatgaatgaaccgtggtgtgtctatgtgtattccccatgtgtacaggggccatggaagccagacgatggcactgatccccagaggatgaagttgatgatccccacaagttgacactggatccccacaagatgtcattggattcccacaaaatgacattggatccncagaaaatgcgttgggttacctggagctgtagttataggcagttgtaagccacctgcatgggtgctgggaaccaaacttgggtgctcataaccatcaacccatctctcctgacccttattttttttttaagtgtgtgtgtgtgtgtgtgtgtgtgtgtgtgtgtgtgcacctgtgtgcacagaagtgtacatgctcat

SEQ ID NO: 3897 - DNA, 530 bp, Mus musculus; identical to SEQ ID NO: 3896
  misc_feature (332)..(332): n is a, c, g, or t

SEQ ID NO: 3898 - DNA, 591 bp, Mus musculus
  misc_feature (187)..(312): n is a, c, g, or t
  misc_feature (471)..(471): n is a, c, g, or t
ttttgtgggcttccatgtagctgttgggaatcgaacccaagtcctctggaaggacagtcagtgcttttaaatgttgtgccatcactccagctccaagaaggcattttttgtactgtgggggtatacagtatacacttgaattattgctcaaaatcatacatatattggccagacatagttctggaannnnnnnnnnnnnnnnnnnnnnnnnnnnnnnnnnnnnnnnnnnnnnnnnnnnnnnnnnnnnnnnnnnnnnnnnnnnnnnnnnnnnnnnnnnnnnnnnnnnnnnnnnnnnnnnnnnnnnnnnnnnnncaacaaagaaaaccaaccaaacaaaaaaaaacccaaaaaacataaaacaaaaatattttaaatccctatatattgtactttatagactgtataaaaatcttacatgtacatggtcctgattttgcatgagagagaggagaaaagactgatttaaagatntttactattttcagacttttcttcctggtgagacatgctggcacatgcccataatcctagcactgaggagtagatgcaggaagatgaggagtttaggactaccttttgctaaataatgag

SEQ ID NO: 3899 - DNA, 591 bp, Mus musculus; identical to SEQ ID NO: 3898
  misc_feature (187)..(312): n is a, c, g, or t
  misc_feature (471)..(471): n is a, c, g, or t

SEQ ID NO: 3900 - DNA, 556 bp, Mus musculus
  misc_feature (349)..(349): n is a, c, g, or t
gcattctcaaggagatttctcctcttctctctatggaggctatggcgtttgtaactgaagacaggaaatttactcaagaagctacatacccaaatacatatatttttgacttatttggaggtgttgatcttcttgtagaaattcttatgaggcctaccatctctatccggggacagaaactaaaaataagtgacgagatgtcgaaggactgcttgagcatcctgtacaatacctgtgtctgcacggaaggagtaacgaagcgtttggcagaaaagaatgattttgtgatttttctgttcacactgatgacaagtaagaagacattcttacaaacagcgactctcattgnaagacattttgggtgttaagaaggaaatgatccggctagatgaagttcccaatctgagttccttagtatccaatttcgatcagcagcagcttgctatcttttgcaggatcctggctgtcaccatttcagagatggacacggggaatgacgacaaacacacgcttcttgccagtttattaacagcaaataaaccgattaaatggagac

SEQ ID NO: 3901 - DNA, 556 bp, Mus musculus; identical to SEQ ID NO: 3900
  misc_feature (349)..(349): n is a, c, g, or t

SEQ ID NO: 3902 - DNA, 459 bp, Mus musculus
  misc_feature (72)..(91): n is a, c, g, or t
  misc_feature (401)..(401): n is a, c, g, or t
ctgtcacttagcagtatttggccatcccccttctgagtaccaaatggttaacatgaatgtcaaattgagttnnnnnnnnnnnnnnnnnnnnattggactagctcttaagacactagatttgcagttgacattagtcccctcaattcataactttgaagtaggcagtagaatttgtgttatttgtaccctctacttaaagtaaaaggtttttatgagtagccttcctttcttgaaatgaaaagaaaaaaaagcttttttagtgaaatccatcatggaaaattagagaaaaatagcaagatgtttgttgttgtatttaccataccttagaactcacacttaaactagtattttgtagttttacattcctttttaactcattcagtggagaatatcagactttntcccaagttgtatgttaagtcaattctaataatgtactcagcatcaaagacaaacatg

SEQ ID NO: 3903 - DNA, 459 bp, Mus musculus; identical to SEQ ID NO: 3902
  misc_feature (72)..(91): n is a, c, g, or t
  misc_feature (401)..(401): n is a, c, g, or t

SEQ ID NO: 3904 - DNA, 351 bp, Mus musculus
gactcaccattggaattgtaatatttatgtgcagttttgaaaattgtttcaaagcatcacttgttgatgaataaatatataataaaagggttctctgatgaagtgtttaggaaacatctaggttagaaggtttaaaggtgcatttatttctggtagttatatgaatttattcaggatgcccacaacttccatatgtctggcagcagagtgtttcctccctcttggtgggagacatatattttacaaaagtttttatgtacttttctaaaaaatttttacaaacaagtgttgtgcatttaattgaagcttttcttggcaacttgtaaagtgtgttcattctaactgttaaac

SEQ ID NO: 3905 - DNA, 351 bp, Mus musculus; identical to SEQ ID NO: 3904

SEQ ID NO: 3906 - DNA, 147 bp, Mus musculus
  misc_feature (83)..(83): n is a, c, g, or t
agggccagcagagagaagagactccatcttccagaggttgccactgtctgcctccccattcagtcatctttttaagtgacacntcatttgtctggtccctcattgtcacacttaacatcattcctgttggcatgacatttgaatcat

SEQ ID NO: 3907 - DNA, 147 bp, Mus musculus; identical to SEQ ID NO: 3906
  misc_feature (83)..(83): n is a, c, g, or t

SEQ ID NO: 3908 - DNA, 334 bp, Mus musculus
tcctgaacaagagtactggaaggaaaagccacggtgctctttcctatcatttggtgttccagagttacttattttgaccaggtgtgttggcacacacccttagttccagctttcgaggggctggtggacctgagtttgaggccagtcttttctacacagcaagttaaggttagctagagctagccaaaattgttttgtttctgggacaggatttctctgtgtagtcttggctatacaggaattcactatgtagacgaggctggccttgaacttggagctccatctgccactgcaatgctgggagtaaaggtgtgggtcccactactgcccagca

SEQ ID NO: 3909 - DNA, 334 bp, Mus musculus; identical to SEQ ID NO: 3908

SEQ ID NO: 3910 - DNA, 452 bp, Mus musculus
  misc_feature (214)..(215): n is a, c, g, or t
  misc_feature (358)..(358): n is a, c, g, or t
  misc_feature (364)..(364): n is a, c, g, or t
  misc_feature (373)..(373): n is a, c, g, or t
gaacaggacagcacaaccctcggtccactaacaggtaaggaaacttgtgataaccagttggtgtgaggggaaaacaacttggctgcatttcccctccttcgctcacccagaatataacaggtcccagaaataggacaccatggctgactgacacgcgccgcagggacacgcggcacctttaggaatagaggaggggcttcaggcttcagcggannttaccaccctgcgcacaggcagctggtcccttccccaaggcagtgctgttcgttcctatcctttaaatccgcacctgcctctgcatctcctttgagctttccagggatcagacactgtgagcttttgaacctctgtcccacangtaaanctgtttccnagcatcttcaccatcatctattgtttggaatacttccgtgttctaatctctacattctggccactaatgattattcctg

SEQ ID NO: 3911 - DNA, 452 bp, Mus musculus; identical to SEQ ID NO: 3910
  misc_feature (214)..(215): n is a, c, g, or t
  misc_feature (358)..(358): n is a, c, g, or t
  misc_feature (364)..(364): n is a, c, g, or t
  misc_feature (373)..(373): n is a, c, g, or t

SEQ ID NO: 3912 - DNA, 448 bp, Mus musculus
  misc_feature (340)..(340): n is a, c, g, or t
  misc_feature (343)..(343): n is a, c, g, or t
  misc_feature (346)..(346): n is a, c, g, or t
acacgtggaggacacgtgatgcttggagggtagaaataggactccacagaatgacgaagagagcttggcttgctggtacagctggctgtgtaacgcttgtgggtctctcgtcttcactgatcttcgcttccctgagagatgcacagctgagaacttctcccggggccccttctgctgtctggagctgaggctgaggcccggctgtctctgctaggtagtgtcactgctgttgctaacctgattcttctgaactgggctcctggtgcatctgtgaggtagtttatctgtgaggtgtttgcgagtggatggagctgccactgcctgctaacctgtgaactgnacntgnagatttccagacaacagacaggagttgctccaaataacctttctaaacaagtccacttccctctacccccacccccatatcctttttactaactctgaaggg

SEQ ID NO: 3913 - DNA, 448 bp, Mus musculus; identical to SEQ ID NO: 3912
  misc_feature (340)..(340): n is a, c, g, or t
  misc_feature (343)..(343): n is a, c, g, or t
  misc_feature (346)..(346): n is a, c, g, or t

SEQ ID NO: 3914 - DNA, 574 bp, Mus musculus
  misc_feature (94)..(151): n is a, c, g, or t
  misc_feature (161)..(161): n is a, c, g, or t
  misc_feature (167)..(167): n is a, c, g, or t
  misc_feature (171)..(171): n is a, c, g, or t
  misc_feature (182)..(182): n is a, c, g, or t
  misc_feature (204)..(204): n is a, c, g, or t
  misc_feature (211)..(211): n is a, c, g, or t
  misc_feature (213)..(213): n is a, c, g, or t
  misc_feature (215)..(215): n is a, c, g, or t
ctttctgaaggtcattgctaagtcaatggctctcttgtggaagatgatcccagcatttattatgcactatgtttacttcttacttggggaaccnnnnnnnnnnnnnnnnnnnnnnnnnnnnnnnnnnnnnnnnnnnnnnnnnnnnnnnnnntttgaagttnaatcanaggntagaaagcttnctggtaattcagcactggattntgctaantntntgggaagagcaaagcccaacttacatgattcgtccgagcatccccatcccgagcagttcagttcggggagggagatggggttggaagtgcagacagggtcctttcatccgtgtgtgttccctttaacggttcatcgtccataacaaagaacagtgtgctgtactcttaaaagagatggaaataaaaagacctcagagctattggagttcttccacatcatctgctctgccagcctcacttgagtcgtcttgatccttgactgcaactggctggtaggacggccagagttgtgggatttcccagaaccgtgggagggtctcctgctgcagggggcaggtgtcgcttcctcccgaactctg

SEQ ID NO: 3915 - DNA, 574 bp, Mus musculus; identical to SEQ ID NO: 3914
  misc_feature (94)..(151): n is a, c, g, or t
  misc_feature (161)..(161): n is a, c, g, or t
  misc_feature (167)..(167): n is a, c, g, or t
  misc_feature (171)..(171): n is a, c, g, or t
  misc_feature (182)..(182): n is a, c, g, or t
  misc_feature (204)..(204): n is a, c, g, or t
  misc_feature (211)..(211): n is a, c, g, or t
  misc_feature (213)..(213): n is a, c, g, or t
  misc_feature (215)..(215): n is a, c, g, or t

SEQ ID NO: 3916 - DNA, 302 bp, Mus musculus
  misc_feature (95)..(98): n is a, c, g, or t
  misc_feature (100)..(100): n is a, c, g, or t
  misc_feature (102)..(107): n is a, c, g, or t
  misc_feature (203)..(203): n is a, c, g, or t
gcgctggctgtggtcccagtgccctcagcctgggctgggcagacgccgcgccccgcagagcgcggcccccggtgcggctcttcaccgaggaggannnngncnnnnnnggcggcgaggaggaggatcagcccatctacttggcagtgaagggagtggtgttcgatgtcacctctgggaaggagttttatggacgaggagccccntacaatgccttggccgggaaggactccagcagaggtgtggccaagatgtcactggatccagcagacctcactcacgacactactggtctcacggccaag

SEQ ID NO: 3917 - DNA, 302 bp, Mus musculus; identical to SEQ ID NO: 3916
  misc_feature (95)..(98): n is a, c, g, or t
  misc_feature (100)..(100): n is a, c, g, or t
  misc_feature (102)..(107): n is a, c, g, or t
  misc_feature (203)..(203): n is a, c, g, or t

SEQ ID NO: 3918 - DNA, 432 bp, Mus musculus
  misc_feature (350)..(351): n is a, c, g, or t
  misc_feature (392)..(392): n is a, c, g, or t
attcttcctgtcaaggtactcatagaaagtgatcattacttatgtgagtaaattcaggggatgtggggaacagcttacatggcttttagtggaaaaccattatgtgtgttttctttattatcataagattgtaagaaaaattaccaagtgaaaggaaaaaaacaatagtgaatttgtataaaacacccaaataaaaggttaaagatatgttaatgttgaacttggagtgccttcatgactgtttgattcttgcaattccaaccttggtttatggtaaaatctcttcagaatttcttgctacttaccaataagaagagactctcaaggtggcaggcagtgcctaggaaaannatataatatccctttctttcctcctcctgatgttccaccantccctcacagtgtgggaaacaggatttccttaccagaggt

SEQ ID NO: 3919 - DNA, 432 bp, Mus musculus; identical to SEQ ID NO: 3918
  misc_feature (350)..(351): n is a, c, g, or t
  misc_feature (392)..(392): n is a, c, g, or t

SEQ ID NO: 3920 - DNA, 533 bp, Mus musculus
  misc_feature (150)..(150): n is a, c, g, or t
actggcctggtactccctatataacccaggctagtctcacactttgtgctggggttacaggcatgtgctaccattcccaggttcttttaatagacctttcaactatctgttgcttcttttctgtaaatatctcaagctctccaattctanaactgaaagtgtggtgctggacactaaacccatggctttgggcatgatcttaggcaagtactttagcaccgattgacttgtcatctttgtaagttagcattgccctaaaactagcaactctactcagacacctcttagcttactctgttgctatttctcatcatagacatctaactcatttctttttctgtgttcttctgctgtaaatgaaactatctttcacctatgctattgcagtcttgtctgcctctaatctctaccctgccgtcagagtaaattctctttcaccaaagtgttattcatttcagctggctgtggtggcttatgtttgttgtcctggaactttgaaggctgagataataggattgttgctagcctgggct

SEQ ID NO: 3921 - DNA, 533 bp, Mus musculus; identical to SEQ ID NO: 3920
  misc_feature (150)..(150): n is a, c, g, or t

SEQ ID NO: 3922 - DNA, 569 bp, Mus musculus; identical to SEQ ID NO: 3186
  misc_feature (337)..(337): n is a, c, g, or t
  misc_feature (453)..(453): n is a, c, g, or t
  misc_feature (458)..(458): n is a, c, g, or t
  misc_feature (462)..(462): n is a, c, g, or t

SEQ ID NO: 3923 - DNA, 569 bp, Mus musculus; identical to SEQ ID NO: 3186
  misc_feature (337)..(337): n is a, c, g, or t
  misc_feature (453)..(453): n is a, c, g, or t
  misc_feature (458)..(458): n is a, c, g, or t
  misc_feature (462)..(462): n is a, c, g, or t

SEQ ID NO: 3924 - DNA, 329 bp, Mus musculus
agagcatgccccagcatcacggcaaccccccagtgctgacagagcgttgtgtggatttcaggctggcacaggactgagagctctcctgaagatggttggcttgcctgtattcacctcaacttatgcaaaacaagaccatttctcttcccacactatcagtcacaccttgagagacacagtgacatggatacaaaggctggccaaagaccatgggtctgctggagggtgtctggactatgacggccatgtgtgggacacatgtgacagaccaccttgcctgttggtagccaccttccactcaatagtccaatcttaccacacaagaaagg

SEQ ID NO: 3925 - DNA, 329 bp, Mus musculus; identical to SEQ ID NO: 3924

SEQ ID NO: 3926 - DNA, 452 bp, Mus musculus
  misc_feature (422)..(422): n is a, c, g, or t
tcctgctgtagcttgggttctggtggctgctgtggctccagctctgggggctgctgtggctccagctctgggggctgctgtagctctggtggctgctgcagttctgggggtggaggctgctgtctgagccaccacagaccccacagatctcttcgtcgccatcgtcacagctctgggtgctgtagcagtggtggcaacagtggctgctgtggcagcagtggtggcagcagcggctgctgtggcagcagtggcagcagtggctgctgtggcagtagccagcagtctgggggctgctgctgacctgggtgaggaagacttcaaacaaatggtgcaggaggagcacatgctcagaagattatccattgcccgatgtcctctcctcctgcttccctccttgttctgccctctgagttgctgaaatntcctgggaaatgttctgcattgtcctcatg

SEQ ID NO: 3927 - DNA, 452 bp, Mus musculus; identical to SEQ ID NO: 3926
  misc_feature (422)..(422): n is a, c, g, or t

SEQ ID NO: 3928 - DNA, 604 bp, Mus musculus
  misc_feature (42)..(60): n is a, c, g, or t
  misc_feature (120)..(121): n is a, c, g, or t
  misc_feature (128)..(128): n is a, c, g, or t
  misc_feature (153)..(153): n is a, c, g, or t
  misc_feature (207)..(207): n is a, c, g, or t
  misc_feature (250)..(281): n is a, c, g, or t
  misc_feature (346)..(346): n is a, c, g, or t
  misc_feature (375)..(376): n is a, c, g, or t
  misc_feature (411)..(411): n is a, c, g, or t
  misc_feature (413)..(413): n is a, c, g, or t
  misc_feature (429)..(429): n is a, c, g, or t
  misc_feature (440)..(440): n is a, c, g, or t
  misc_feature (477)..(491): n is a, c, g, or t
  misc_feature (524)..(524): n is a, c, g, or t
  misc_feature (527)..(527): n is a, c, g, or t
  misc_feature (535)..(535): n is a, c, g, or t
  misc_feature (537)..(537): n is a, c, g, or t
tctcctgtggaagtcccaatagccagagctcctgatattttnnnnnnnnnnnnnnnnnnngtggccacatgtaattttatgcagttgactatatatcttaaacttaataagctcattttnnggttcantagtttaaggtatttgtttactaanatgtttttagagaaaatactgttacttggcattaattgtccatttacagtgttntgttaagttcctcatgctatgcaccttacataatttccctaannnnnnnnnnnnnnnnnnnnnnnnnnnnnnnngcaatctggatataacaaacaccatcactgcttgtgggtaatgtgctgtcatcatataaatattntaccttttcatgtatatagattgcatttnnttaggtgttttaatttttaaaatatatttacattntnaaaaattactgttttntgttttatatntatcaaaagtgatgttatgaaaaattttttgtaaaannnnnnnnnnnnnnntatatatctatacataaatatatatggtatacngantcctatantntttttaatagaatgtgaagttatttagaaattctgtataaaattatagtaagcgtataccttgtggc

SEQ ID NO: 3929 - DNA, 604 bp, Mus musculus; identical to SEQ ID NO: 3928
  misc_feature (42)..(60): n is a, c, g, or t
  misc_feature (120)..(121): n is a, c, g, or t
  misc_feature (128)..(128): n is a, c, g, or t
  misc_feature (153)..(153): n is a, c, g, or t
  misc_feature (207)..(207): n is a, c, g, or t
  misc_feature (250)..(281): n is a, c, g, or t
  misc_feature (346)..(346): n is a, c, g, or t
  misc_feature (375)..(376): n is a, c, g, or t
  misc_feature (411)..(411): n is a, c, g, or t
  misc_feature (413)..(413): n is a, c, g, or t
  misc_feature (429)..(429): n is a, c, g, or t
  misc_feature (440)..(440): n is a, c, g, or t
  misc_feature (477)..(491): n is a, c, g, or t
  misc_feature (524)..(524): n is a, c, g, or t
  misc_feature (527)..(527): n is a, c, g, or t
  misc_feature (535)..(535): n is a, c, g, or t
  misc_feature (537)..(537): n is a, c, g, or t

SEQ ID NO: 3930 - DNA, 146 bp, Mus musculus
cacactcatgatctcagcacaggcagagtcagtaagacaggggtagatactgagttccaggccagtctgggctatatatggtgaaattgtgtctcaaaaataacaaaaagaagtgtgcagccaaatatggtgattcacgaggaagc

SEQ ID NO: 3931 - DNA, 146 bp, Mus musculus; identical to SEQ ID NO: 3930

SEQ ID NO: 3932 - DNA, 490 bp, Mus musculus
  misc_feature (271)..(271): n is a, c, g, or t
  misc_feature (274)..(276): n is a, c, g, or t
  misc_feature (278)..(278): n is a, c, g, or t
  misc_feature (288)..(288): n is a, c, g, or t
  misc_feature (291)..(291): n is a, c, g, or t
  misc_feature (293)..(293): n is a, c, g, or t
  misc_feature (310)..(310): n is a, c, g, or t
  misc_feature (314)..(314): n is a, c, g, or t
  misc_feature (321)..(321): n is a, c, g, or t
  misc_feature (328)..(328): n is a, c, g, or t
  misc_feature (336)..(336): n is a, c, g, or t
  misc_feature (340)..(340): n is a, c, g, or t
agcacaggcagagtcagtaagacaggggtagatactgagttccaggccagtctgggctatatatggtgaaattgtgtctcaaaaataacaaaaagaagtgtgcagccaaatatggtgattcacgaggaagcagaggcaggagggtctcggtgagttccaagacagccaagggctacatagagagacgctgtctcaaaaacagaacaattaaagacaaatgtgcattgggttaggttgtacagtagtaaacatctgcattttctcaccccanatnnntnttatttgganaantnttttcatattttacctntcanaaatctnacttttntcccaganattntcatgaaatgtatcataaaatcaaaccactggtaatccttagtaactgtagtactactaggaccttatacttttatataaaacatattaaggcacaaaaatgtatttcaatgtacttttacacgagtatatacggacagtcacgttttta

SEQ ID NO: 3933 - DNA, 490 bp, Mus musculus; identical to SEQ ID NO: 3932
  misc_feature (271)..(271): n is a, c, g, or t
  misc_feature (274)..(276): n is a, c, g, or t
  misc_feature (278)..(278): n is a, c, g, or t
  misc_feature (288)..(288): n is a, c, g, or t
  misc_feature (291)..(291): n is a, c, g, or t
  misc_feature (293)..(293): n is a, c, g, or t
  misc_feature (310)..(310): n is a, c, g, or t
  misc_feature (314)..(314): n is a, c, g, or t
  misc_feature (321)..(321): n is a, c, g, or t
  misc_feature (328)..(328): n is a, c, g, or t
  misc_feature (336)..(336): n is a, c, g, or t
  misc_feature (340)..(340): n is a, c, g, or t

SEQ ID NO: 3934 - DNA, 548 bp, Mus musculus
  misc_feature (26)..(26): n is a, c, g, or t
  misc_feature (30)..(31): n is a, c, g, or t
  misc_feature (36)..(36): n is a, c, g, or t
  misc_feature (59)..(59): n is a, c, g, or t
  misc_feature (63)..(63): n is a, c, g, or t
  misc_feature (67)..(67): n is a, c, g, or t
  misc_feature (74)..(74): n is a, c, g, or t
  misc_feature (81)..(81): n is a, c, g, or t
  misc_feature (100)..(101): n is a, c, g, or t
  misc_feature (127)..(127): n is a, c, g, or t
  misc_feature (135)..(135): n is a, c, g, or t
  misc_feature (137)..(137): n is a, c, g, or t
  misc_feature (140)..(140): n is a, c, g, or t
  misc_feature (150)..(150): n is a, c, g, or t
  misc_feature (160)..(160): n is a, c, g, or t
  misc_feature (180)..(180): n is a, c, g, or t
  misc_feature (199)..(199): n is a, c, g, or t
  misc_feature (209)..(209): n is a, c, g, or t
  misc_feature (211)..(211): n is a, c, g, or t
  misc_feature (217)..(217): n is a, c, g, or t
  misc_feature (260)..(260): n is a, c, g, or t
  misc_feature (293)..(293): n is a, c, g, or t
  misc_feature (297)..(339): n is a, c, g, or t
  misc_feature (344)..(344): n is a, c, g, or t
  misc_feature (397)..(397): n is a, c, g, or t
  misc_feature (463)..(463): n is a, c, g, or t
cgtgacacatctttcccttgtctctngccnngggcntacatgtgttaacacttttgtgnggcntgantcagttnatgtgcnacaaaacatttaaactaanntgagcaacatagacaaattctttganggaggaananaantgtcacaaanggttactatncagtacattcagaccacaangcaccttggacccatcaangatgcctaangntaagangacaacatagagcaaagcaaacaggctttccattctagctttnaactcttgatatttttgtcatgccttaatgagnttannnnnnnnnnnnnnnnnnnnnnnnnnnnnnnnnnnnnnnnnnnagggncctattcctatggagtcccaaaatctatgaagtacctatagtatatgtaaagntgtccaataatatgcaggtaacttatctacatgaagtatttacttttaaaaaatgtattttaaggntttagttgtaataaaaacaaaagaaaagaatctccctctgcctagtcattatacccctttctgtatagcaaactatcaataaaat

SEQ ID NO: 3935 - DNA, 548 bp, Mus musculus; identical to SEQ ID NO: 3934
  misc_feature (26)..(26): n is a, c, g, or t
  misc_feature (30)..(31): n is a, c, g, or t
  misc_feature (36)..(36): n is a, c, g, or t
  misc_feature (59)..(59): n is a, c, g, or t
  misc_feature (63)..(63): n is a, c, g, or t
  misc_feature (67)..(67): n is a, c, g, or t
  misc_feature (74)..(74): n is a, c, g, or t
  misc_feature (81)..(81): n is a, c, g, or t
  misc_feature (100)..(101): n is a, c, g, or t
  misc_feature (127)..(127): n is a, c, g, or t
  misc_feature (135)..(135): n is a, c, g, or t
  misc_feature (137)..(137): n is a, c, g, or t
  misc_feature (140)..(140): n is a, c, g, or t
  misc_feature (150)..(150): n is a, c, g, or t
  misc_feature (160)..(160): n is a, c, g, or t
  misc_feature (180)..(180): n is a, c, g, or t
  misc_feature (199)..(199): n is a, c, g, or t
  misc_feature (209)..(209): n is a, c, g, or t
  misc_feature (211)..(211): n is a, c, g, or t
  misc_feature (217)..(217): n is a, c, g, or t
  misc_feature (260)..(260): n is a, c, g, or t
  misc_feature (293)..(293): n is a, c, g, or t
  misc_feature (297)..(339): n is a, c, g, or t
  misc_feature (344)..(344): n is a, c, g, or t
  misc_feature (397)..(397): n is a, c, g, or t
  misc_feature (463)..(463): n is a, c, g, or t

SEQ ID NO: 3936 - DNA, 382 bp, Mus musculus
actgtcctgtatagttctcttgattttatttcataaacatgacttctttcttcaaaagcaaagtggttttctaattttttatgaaataagcaaatatgccattttgtctgagtacagtttcaggaagctattgaaagttctggctcagggctttttaacagttaaagcaattgttaatatattttggaaactccatctgcataactcttcagtgccttgattaacttggcaacacttaaaaaaactttgtactaggtaaccttcagtgcaccagtcatgatatgcacgttctgatcatactgctaagcatgtgcaagaacacctctacgtgtgggtttgcataattctataagggaagtgttctacatttgcacttgatact

SEQ ID NO: 3937 - DNA, 382 bp, Mus musculus; identical to SEQ ID NO: 3936

SEQ ID NO: 3938 - DNA, 249 bp, Mus musculus
gtgcacccttctcagggcagattcccacacattctttatgctcctgaagacacctccaccccgtcctttgcttcccaatctccatctccctccctgtcacacatcccccagtcaagagcagaccgtatccttcactttggtcatttgggatgctagagcccttcctgtcagtgttttggactccatctcttgtcctctaataccttgcttattactgataattttattgagattccaaacttttcgatg

SEQ ID NO: 3939 - DNA, 249 bp, Mus musculus; identical to SEQ ID NO: 3938

SEQ ID NO: 3940 - DNA, 319 bp, Mus musculus
  misc_feature (35)..(35): n is a, c, g, or t
  misc_feature (54)..(54): n is a, c, g, or t
  misc_feature (56)..(59): n is a, c, g, or t
  misc_feature (62)..(62): n is a, c, g, or t
  misc_feature (70)..(70): n is a, c, g, or t
  misc_feature (72)..(72): n is a, c, g, or t
ccattgttcaacagatttgaaagtagggtattaanatattctaataaatcaatngnnnnagngttggctnanaggtttatctatggatatgtcctagttactggcatatgtgtgtgtttgctgttaatttgatttaatgatttgttagttttttttcttgataatagttatttcttcactgtacattgagatacagcactactgcacaccaaagtatgtaatacccaaaggaaactgtgtgatttcttctaacaaatgatgggagcctttctcagtgagatactctgaaaaggagactttgaggccattctaatccctt

SEQ ID NO: 3941 - DNA, 319 bp, Mus musculus; identical to SEQ ID NO: 3940
  misc_feature (35)..(35): n is a, c, g, or t
  misc_feature (54)..(54): n is a, c, g, or t
  misc_feature (56)..(59): n is a, c, g, or t
  misc_feature (62)..(62): n is a, c, g, or t
  misc_feature (70)..(70): n is a, c, g, or t
  misc_feature (72)..(72): n is a, c, g, or t

SEQ ID NO: 3942 - DNA, 366 bp, Mus musculus
  misc_feature (100)..(116): n is a, c, g, or t
  misc_feature (129)..(129): n is a, c, g, or t
  misc_feature (134)..(134): n is a, c, g, or t
  misc_feature (143)..(143): n is a, c, g, or t
  misc_feature (149)..(149): n is a, c, g, or t
ctgtttagccccacgtggactgtctgtagtcagggtgcccagagtctgaaacaaaaggaattattacactcaaaccgcggggggaggggggtactggggnnnnnnnnnnnnnnnnncagacagacagtnccatngcagacatngcaganccctccctcaccttgtgtctttggatttgttcagccattttatttgtctcaagttgaatgtaccggcttagccaaatcactacagaaggtggtttctttaaaccttttagacagatgcataaaagctacctctgacttctcatagatttgtgtttgctctgaagcatcgctatccacactgaatatagccaaaatatcgcctgaataaaccgagtta

SEQ ID NO: 3943 - DNA, 366 bp, Mus musculus; identical to SEQ ID NO: 3942
  misc_feature (100)..(116): n is a, c, g, or t
  misc_feature (129)..(129): n is a, c, g, or t
  misc_feature (134)..(134): n is a, c, g, or t
  misc_feature (143)..(143): n is a, c, g, or t
  misc_feature (149)..(149): n is a, c, g, or t

SEQ ID NO: 3944 - DNA, 220 bp, Mus musculus
gtcctccagagatctcctccagttttctcgggtgtctctgaggaactccagctgaccagagccaacaggcactgctggcttacctggaagatgtgtctaaatatgtataacaggcctggacagacttaggaagaaatgaaagcgtgctgctacattgtcctggagttgttttctgtatatatacattttggcttgtgagatttatcacacgggcttgaga

SEQ ID NO: 3945 - DNA, 220 bp, Mus musculus; identical to SEQ ID NO: 3944

SEQ ID NO: 3946 - DNA, 501 bp, Mus musculus
  misc_feature (208)..(209): n is a, c, g, or t
  misc_feature (211)..(211): n is a, c, g, or t
  misc_feature (213)..(213): n is a, c, g, or t
  misc_feature (221)..(221): n is a, c, g, or t
  misc_feature (257)..(257): n is a, c, g, or t
aatgctaaagccttcggtattagaaaatcgatggtaatattctgccaaggattttccagcctcctcctcatggagaagaaaaatcatagtccttaaacattcttcagacgggacagtcaccctcatacagaattagtgtaaatcacaaaatgccccagaactggaggcgttgtgatctaaggcttcatcgtattctaagatggctttnncngnggagaccnacggaaggcgtgagtgttgtggattctatgcaatgnaggatcgggagacggctgttctgtccatggcacagtatcacatctgttctgaggggatgtgatgaggcgttaggggatgctctgttgatctctcactcagaaacactacaaacgtcaatacaagaactgacacaactttgccttaaagagcaccagactgggattggtcgtattgtgttaataaggaagacttagagtgttcactgatgtttacgattttaatatttctgaaggccatcaccgt

SEQ ID NO: 3947 - DNA, 501 bp, Mus musculus; identical to SEQ ID NO: 3946
  misc_feature (208)..(209): n is a, c, g, or t
  misc_feature (211)..(211): n is a, c, g, or t
  misc_feature (213)..(213): n is a, c, g, or t
  misc_feature (221)..(221): n is a, c, g, or t
  misc_feature (257)..(257): n is a, c, g, or t

SEQ ID NO: 3948 - DNA, 379 bp, Mus musculus
  misc_feature (35)..(35): n is a, c, g, or t
  misc_feature (164)..(164): n is a, c, g, or t
atgcagcaaactgtagggaccggcggtacacgccnttcatcctatccctcctaaagtgagttcgatacccaagaactacaaaaggcaatcctgtctcaaacaactcggccgatcatttttattctccagacaagtaacttttctaaaacacttagctgaaagcntctcctaaaactaaatgacctcagtgcatccctcgcgggtcacatctggcgcttgcgtaaggatgcggctaggaagttaagctggtttctgccaaagccactttctccgccttagtgctactccgccaacttccgacctactcggcaaagtttgtttccgcgccacgccgccccgtgcgagccctggagggaccgaggagaaccacgccgagtcg

SEQ ID NO: 3949 - DNA, 379 bp, Mus musculus; identical to SEQ ID NO: 3948
  misc_feature (35)..(35): n is a, c, g, or t
  misc_feature (164)..(164): n is a, c, g, or t

SEQ ID NO: 3950 - DNA, 532 bp, Mus musculus
  misc_feature (43)..(43): n is a, c, g, or t
  misc_feature (45)..(45): n is a, c, g, or t
  misc_feature (237)..(237): n is a, c, g, or t
  misc_feature (239)..(239): n is a, c, g, or t
  misc_feature (317)..(331): n is a, c, g, or t
  misc_feature (338)..(338): n is a, c, g, or t
  misc_feature (343)..(343): n is a, c, g, or t
  misc_feature (351)..(351): n is a, c, g, or t
  misc_feature (353)..(353): n is a, c, g, or t
  misc_feature (373)..(373): n is a, c, g, or t
  misc_feature (493)..(493): n is a, c, g, or t
  misc_feature (495)..(495): n is a, c, g, or t
  misc_feature (498)..(498): n is a, c, g, or t
tgtggtctcagtgctctgtgtcctcagctcccatacttgggancnacacagtcaagtaggaataaaatgtagtgtcagttggccacaatgtccctggcagatcctgacgtcctggggcaagttcacaggttgatgaccgtgctgctccagggtcctgcagcataacagatcaggcattagggaccaccatcaaccctatcctccctgcctctgaggaagaccacgttgtccgccagnantcccaacctgatcctaaggtccgcagcatctttaatacttgtcacgagaactgaagctctggccacccacgggtacannnnnnnnnnnnnnntggacantgggnccatgctntngaaccagtgaggacatggantttgttccttgggttcccacccaaggcagacacctccttgcttgaggtagtggggaataccagaggtggattcctgacaccggaatgtgctgactggaagggaagtttagtaattccaantnttntcaaaactagaaacttctgtttaaaagtcgacat

SEQ ID NO: 3951 - DNA, 532 bp, Mus musculus; identical to SEQ ID NO: 3950
  misc_feature (43)..(43): n is a, c, g, or t
  misc_feature (45)..(45): n is a, c, g, or t
  misc_feature (237)..(237): n is a, c, g, or t
  misc_feature (239)..(239): n is a, c, g, or t
  misc_feature (317)..(331): n is a, c, g, or t
  misc_feature (338)..(338): n is a, c, g, or t
  misc_feature (343)..(343): n is a, c, g, or t
  misc_feature (351)..(351): n is a, c, g, or t
  misc_feature (353)..(353): n is a, c, g, or t
  misc_feature (373)..(373): n is a, c, g, or t
  misc_feature (493)..(493): n is a, c, g, or t
  misc_feature (495)..(495): n is a, c, g, or t
  misc_feature (498)..(498): n is a, c, g, or t

SEQ ID NO: 3952 - DNA, 307 bp, Mus musculus
ttactacagtacttgatgctcgtgaggatcgtggcacaaaatagctttaagtgtgtcttagatacttgtctgccgtagtctattggctgcatatgctggaatttttgtattccatttagtatttttatagtctagggaaatattttctgaggccagttttagatgtgtttggattcctatagaaatactcggtttactgcacctgcttggtggttggaaggaggccaaagctcaattcagacactcgttttccctccaaaaataaataatgacctgttccctttgacaagctgtagaactgggtcca

SEQ ID NO: 3953 - DNA, 307 bp, Mus musculus; identical to SEQ ID NO: 3952

SEQ ID NO: 3954 - DNA, 529 bp, Mus musculus
  misc_feature (185)..(185): n is a, c, g, or t
  misc_feature (187)..(187): n is a, c, g, or t
  misc_feature (224)..(224): n is a, c, g, or t
  misc_feature (244)..(244): n is a, c, g, or t
  misc_feature (264)..(264): n is a, c, g, or t
  misc_feature (339)..(339): n is a, c, g, or t
  misc_feature (369)..(369): n is a, c, g, or t
  misc_feature (378)..(378): n is a, c, g, or t
  misc_feature (415)..(415): n is a, c, g, or t
  misc_feature (492)..(492): n is a, c, g, or t
  misc_feature (494)..(494): n is a, c, g, or t
gtaaagttccttatcttagacttgtataagcaagtaaaagctaaatttgggcactaatgttaactgatttctaaaattttggttttagttggtaatgagtcattcactcaaggtccatttggcataagtgggacctttgtagttgtggtggatatacaggggctgctgttgctgtgtttctttgngnccatagatctctctggaactatctaaaatctcttagnggtcttttcgttaagttaangaaatactaccttttaatangaatatcattcttatgaaataatgagagtaattacttaagtacttggcatagtaaatgcctataaaacattgtangaatttattttttcttttataatggggatnttgtaaatnacatatttgtattaaggttatttcctaagacaaagcnatatactatagactaaaccaaatgtaaactattgtaggcagctggattcttttgtagtattgtaaattttgttggantntttatattatgtcatgaatacacttgtccattgtt

SEQ ID NO: 3955 - DNA, 529 bp, Mus musculus; identical to SEQ ID NO: 3954
  misc_feature (185)..(185): n is a, c, g, or t
  misc_feature (187)..(187): n is a, c, g, or t
  misc_feature (224)..(224): n is a, c, g, or t
  misc_feature (244)..(244): n is a, c, g, or t
  misc_feature (264)..(264): n is a, c, g, or t
  misc_feature (339)..(339): n is a, c, g, or t
  misc_feature (369)..(369): n is a, c, g, or t
  misc_feature (378)..(378): n is a, c, g, or t
  misc_feature (415)..(415): n is a, c, g, or t
  misc_feature (492)..(492): n is a, c, g, or t
  misc_feature (494)..(494): n is a, c, g, or t

SEQ ID NO: 3956 - DNA, 523 bp, Mus musculus
  misc_feature (26)..(26): n is a, c, g, or t
  misc_feature (78)..(78): n is a, c, g, or t
  misc_feature (83)..(83): n is a, c, g, or t
  misc_feature (89)..(89): n is a, c, g, or t
  misc_feature (122)..(122): n is a, c, g, or t
  misc_feature (129)..(129): n is a, c, g, or t
  misc_feature (157)..(157): n is a, c, g, or t
  misc_feature (161)..(161): n is a, c, g, or t
  misc_feature (167)..(167): n is a, c, g, or t
  misc_feature (259)..(286): n is a, c, g, or t
gcaggcatatcattggcgtatggcantcattcaaaaggatcagaaaccattcagagaggaccatacctaccttaaaanaaaanagaagnaaggaaaggaaaggaaagggaaaaaaaagtgtngcgtttnagagctaacatatttaattaaataaatnaatntgggtntgcatctcttattaaataaaaatataaaaatatgtacattacattttgcttattttcatataaaaggtaagaaagagtttgcaaagcatttnnnnnnnnnnnnnnnnnnnnnnnnnnnnaatgtgtttttccctcaatagcttcgctaatattttaaacagtcctgtaaaaacccaccaaggactttttgtatagaaagcactaccctaagccatgaggatctccatgctttgctaaccaagataactgttttctctttgtagaagttttgtttttgaaatgtgtatttctaattatataaaatattaagaatcttttaaaaatctgtgaaattaacatgcttgtgtatagctttc

SEQ ID NO: 3957 - DNA, 523 bp, Mus musculus; identical to SEQ ID NO: 3956
  misc_feature (26)..(26): n is a, c, g, or t
  misc_feature (78)..(78): n is a, c, g, or t
  misc_feature (83)..(83): n is a, c, g, or t
  misc_feature (89)..(89): n is a, c, g, or t
  misc_feature (122)..(122): n is a, c, g, or t
  misc_feature (129)..(129): n is a, c, g, or t
  misc_feature (157)..(157): n is a, c, g, or t
  misc_feature (161)..(161): n is a, c, g, or t
  misc_feature (167)..(167): n is a, c, g, or t
  misc_feature (259)..(286): n is a, c, g, or t

SEQ ID NO: 3958 - DNA, 495 bp, Mus musculus
  misc_feature (54)..(54): n is a, c, g, or t
  misc_feature (115)..(115): n is a, c, g, or t
  misc_feature (140)..(140): n is a, c, g, or t
  misc_feature (236)..(236): n is a, c, g, or t
  misc_feature (243)..(243): n is a, c, g, or t
  misc_feature (300)..(300): n is a, c, g, or t
  misc_feature (316)..(316): n is a, c, g, or t
  misc_feature (324)..(324): n is a, c, g, or t
  misc_feature (385)..(385): n is a, c, g, or t
  misc_feature (387)..(387): n is a, c, g, or t
  misc_feature (447)..(447): n is a, c, g, or t
taagcatcgtttatgggaaactcttctctaaaaccagagttgggagtatatatntgtgttcagttcccaaaacctagttgttgctattatagtaacagtggagttccttgggaangaagttttcacaaagcagggtaatncaatgctacttcagctttctagtcttcatagttacatatctactttccaatagagcagttccaaacaaatgtgacagatggatacttggctctacnttgtagnaacacgtaatctttgttatcttgcttaggtagacatggatgagatgtacacgagatncatattatcacaacgntcccattntgcgtgtgtgcatcccaaggcccctcatggatatctgaagccttgtgtagtattaactctntntatcaggttttcctatgtacatacatccctaggctgatgtttataagcaccacaagagtnttcacgtcaaagaattacaactccacttccacctcagtattcttgggc

SEQ ID NO: 3959 - DNA, 495 bp, Mus musculus; identical to SEQ ID NO: 3958
  misc_feature (54)..(54): n is a, c, g, or t
  misc_feature (115)..(115): n is a, c, g, or t
  misc_feature (140)..(140): n is a, c, g, or t
  misc_feature (236)..(236): n is a, c, g, or t
  misc_feature (243)..(243): n is a, c, g, or t
  misc_feature (300)..(300): n is a, c, g, or t
  misc_feature (316)..(316): n is a, c, g, or t
  misc_feature (324)..(324): n is a, c, g, or t
  misc_feature (385)..(385): n is a, c, g, or t
  misc_feature (387)..(387): n is a, c, g, or t
  misc_feature (447)..(447): n is a, c, g, or t

SEQ ID NO: 3960 - DNA, 348 bp, Mus musculus
caaggtttcacgtggccagacctatctcaaactcactctgtagctgaggttagacctgcttggctctgcctccccatgcctggtttctacaccctgtttttgtgcttctcaggccccattctgtatccagcacatagtaggtcaccactggacatatgaaggtgagattggaactgcacatggattggcactcctttcaccccaggacctccgcacctggcatgaagacttgtcctgggggagggaaagagcttttcctgagcttcacccactagctcctctttttctccctacacacacagaccctggggcttacacaagtggctgctagaccctgctgtaatcatt

SEQ ID NO: 3961 - DNA, 348 bp, Mus musculus; identical to SEQ ID NO: 3960

SEQ ID NO: 3962 - DNA, 405 bp, Mus musculus
  misc_feature (314)..(315): n is a, c, g, or t
  misc_feature (320)..(320): n is a, c, g, or t
  misc_feature (323)..(323): n is a, c, g, or t
  misc_feature (332)..(332): n is a, c, g, or t
  misc_feature (352)..(354): n is a, c, g, or t
  misc_feature (363)..(364): n is a, c, g, or t
gagatcgataactttccatgcctttatatttggcagtttacaacttttcctactacggcaacctttttgccataattctttggaggtaacacaatattttgaagtcttatgaatttgattttataccagtgagaagtcaaagttttagcggtctttcctgtagtgtatggttttactcttttaaagtcatctctggattttagaagagaacctattgtacttggtggctccaaaaggtgatttggggagccctgtcccttcccttcttgctctgctcccccccccccctttccctttgcagggtctcaaaaaannaaaanaanaaaaaaaangatggttctagttgattggnnnggtctttgnngggccccccttctctttttaagctttcattcaggttgatac

SEQ ID NO: 3963 - DNA, 405 bp, Mus musculus; identical to SEQ ID NO: 3962
  misc_feature (314)..(315): n is a, c, g, or t
  misc_feature (320)..(320): n is a, c, g, or t
  misc_feature (323)..(323): n is a, c, g, or t
  misc_feature (332)..(332): n is a, c, g, or t
  misc_feature (352)..(354): n is a, c, g, or t
  misc_feature (363)..(364): n is a, c, g, or t

SEQ ID NO: 3964 - DNA, 393 bp, Mus musculus
  misc_feature (131)..(131): n is a, c, g, or t
  misc_feature (152)..(152): n is a, c, g, or t
  misc_feature (337)..(337): n is a, c, g, or t
ccctttgcctgaggtattggtgaggggaattccgtcccagttggactccagttgatgttgctgtcattgggtcttaaggcaagcagtctaggaatcaagtccccaaccatcagaaaactaacaagtccctngtatttgtaagccagactttngacatcagctgaggaacagcagcaatccctatgggtcagtggtaaaggcacctccatcaagtctgcagacatgattccaatcccagcacccacagactagaaagataacggtttctcacaagttgtctgcacgtgtccacacacataaacacacaaaatgaaacttcagagctggaacaaaacanataaaacagggcttattggatgacttacaaatgtgaaagcacatgtcaccaaacct

SEQ ID NO: 3965 - DNA, 393 bp, Mus musculus; identical to SEQ ID NO: 3964
  misc_feature (131)..(131): n is a, c, g, or t
  misc_feature (152)..(152): n is a, c, g, or t
  misc_feature (337)..(337): n is a, c, g, or t

SEQ ID NO: 3966 - DNA, 385 bp, Mus musculus
  misc_feature (39)..(39): n is a, c, g, or t
  misc_feature (41)..(42): n is a, c, g, or t
  misc_feature (50)..(50): n is a, c, g, or t
  misc_feature (56)..(56): n is a, c, g, or t
  misc_feature (64)..(64): n is a, c, g, or t
  misc_feature (93)..(93): n is a, c, g, or t
  misc_feature (108)..(108): n is a, c, g, or t
  misc_feature (263)..(263): n is a, c, g, or t
gcaaggcacaggagcgcgcctacctcccacggaagactngnntggggctncccctngggtgcanagccagggccccacaacccaagagacagntctccacactggtgntttctgaaaacgtggggacactcccagcacaatttggagcgtccgtggtaggacagcctaaaacccagcttgtctttctgtgactgtaccaaactgaatgcaattcacctcataacttaaaactgaatgtttaatacaattctgtcttaatccangtatcctttccctcctattttttattatgcattgtctatacttaattggtgattcttttctcttgttttttactgggcatgaggagaaatgtttggtttggctttccccatcataataaagg

SEQ ID NO: 3967 - DNA, 385 bp, Mus musculus; identical to SEQ ID NO: 3966
  misc_feature (39)..(39): n is a, c, g, or t
  misc_feature (41)..(42): n is a, c, g, or t
  misc_feature (50)..(50): n is a, c, g, or t
  misc_feature (56)..(56): n is a, c, g, or t
  misc_feature (64)..(64): n is a, c, g, or t
  misc_feature (93)..(93): n is a, c, g, or t
  misc_feature (108)..(108): n is a, c, g, or t
  misc_feature (263)..(263): n is a, c, g, or t

SEQ ID NO: 3968 - DNA, 377 bp, Mus musculus
  misc_feature (73)..(106): n is a, c, g, or t
  misc_feature (184)..(184): n is a, c, g, or t
  misc_feature (190)..(218): n is a, c, g, or t
tgcctttagaaagctttagacttcttgaccctgctcataaacagtgctccttgagccaggatactaagtgttnnnnnnnnnnnnnnnnnnnnnnnnnnnnnnnnnngaggtagagtcacgtcacttcctgccaggcagatgtccctgttcagcccttgcggggttccttctttcccctctgggntgcatnnnnnnnnnnnnnnnnnnnnnnnnnnnnnttctgcttctcccgcccacagagcgcttcacagtaggtgccaaaaatgtcctcagtaaatcttggaaaagtggcaatcctgcattcacacaccgacacactgacctacaagtgcctgcaggagccacctgccgggctctgcatcctacccggtctgttg

SEQ ID NO: 3969 - DNA, 377 bp, Mus musculus; identical to SEQ ID NO: 3968
  misc_feature (73)..(106): n is a, c, g, or t
  misc_feature (184)..(184): n is a, c, g, or t
  misc_feature (190)..(218): n is a, c, g, or t

SEQ ID NO: 3970 - DNA, 601 bp, Mus musculus
  misc_feature (539)..(539): n is a, c, g, or t
  misc_feature (541)..(556): n is a, c, g, or t
gagatcacggcagctcagtccctaccactagctcaacagtccctgatctccagagtctgcctttgtcactgagaacaggctcctgccgggttgcagggaaggcaggtggtgttagcttagctaagagtctagagctgtgtggaagcaccttcacattgaaggatacactggcccacagcaccacgcatgtctgtcggggcccacagtgtcgtccctggggagctctagggagacctgcaggacaggacctgccttcacatcattgccgggggctctccaggtggagctctgtatggctctgtagctgcttgctgttttgaggcagattcagttggtgctgttcgcactcctgggctgggctgagcagactgagcaagctttggggctctgagggtgtgaccttgccaggccagccttgttttacagggaatgatggtgacctcgtggttctgttgctctgaactctgcatacactgcagaacagaaggaaatgaacagaaatcacagcatcaataaagacaaactttgcatagctttcngnnnnnnnnnnnnnnnncctccatagctgatcttaagaaattcaatgtgtgtatgctcttca

SEQ ID NO: 3971 - DNA, 601 bp, Mus musculus; identical to SEQ ID NO: 3970
  misc_feature (539)..(539): n is a, c, g, or t
  misc_feature (541)..(556): n is a, c, g, or t

SEQ ID NO: 3972 - DNA, 398 bp, Mus musculus
  misc_feature (187)..(187): n is a, c, g, or t
  misc_feature (204)..(204): n is a, c, g, or t
  misc_feature (208)..(208): n is a, c, g, or t
  misc_feature (211)..(211): n is a, c, g, or t
  misc_feature (288)..(288): n is a, c, g, or t
  misc_feature (354)..(354): n is a, c, g, or t
  misc_feature (372)..(372): n is a, c, g, or t
ctaaactgaggcaggcctacaaggcagttaacttacaaaaagaaaaaggatttttttttttttttttttttttttttggctgaccattctggatgttcccacgcaagataaggaagtcgtgttgctttgggcctctggcaacaatgccaagtggcaatggcagggagcacatggcagagcaaaattnccctatgagccaggaanaaanaanagacgcttggacccaagtcctccaatccttcaagggtgtgttccagtagcctaaagccctttccctagctccacttntaaaggtcccctcacctccctgcacagctttggaataagcctttagcccatctgcagccatagcanaggtcaaaatcggctttntggcattttggtctatgtttcttgca

SEQ ID NO: 3973 - DNA, 398 bp, Mus musculus; identical to SEQ ID NO: 3972
  misc_feature (187)..(187): n is a, c, g, or t
  misc_feature (204)..(204): n is a, c, g, or t
  misc_feature (208)..(208): n is a, c, g, or t
  misc_feature (211)..(211): n is a, c, g, or t
  misc_feature (288)..(288): n is a, c, g, or t
  misc_feature (354)..(354): n is a, c, g, or t
  misc_feature (372)..(372): n is a, c, g, or t

SEQ ID NO: 3974 - DNA, 461 bp, Mus musculus
ggcacatctctataaaacagagatttgatcatgtcatcaaaggacacatcctattgaaaacataaaccagaataaagtataataacatccttgtgctaaagtcacaatgaagaaagcagatcagctcagaagcttccagaagtgaccccataactgaccatctattgggcttagaaatagaggtttctgcctgcagagctttgatattcctgtaatgtccagtagatcctctttttcagagttttcttttcatctcatgccagaaagccttgatgtttgagaagaagtcaagtctagcccagtcgatttgatgcttgggtagcattgagaaggcagagggtatcgctctgccctgtgtttgctggcctgggcacccacagctctgcccacaggcagggtccctggccctggttggtgaatgtgaagtcaggggcacctgtccttgctctactgtctctacg

SEQ ID NO: 3975 - DNA, 461 bp, Mus musculus; identical to SEQ ID NO: 3974

SEQ ID NO: 3976 - DNA, 353 bp, Mus musculus
  misc_feature (293)..(293): n is a, c, g, or t
ggctcctcatctctacacctgaggatttcttttgatttcaggaacagccttaatcattccagtttgatttacatgtatacctcatgaacatttttttgttgttgttgttttatttttctttctctccctttcttttctttgcttttatccctttgtctctcccccaccccacccccaccccgcaacctcgtgactgatggtttggtttcctctctgctctgcccctgctcagcacagggagaaacgttgatttagaagcaatagcgggcagcaggccaccaagagcacaaacncagggcgaggtctagggaggctcctcagcccgcctgtttactgtcttcttaagccatcag

SEQ ID NO: 3977 - DNA, 353 bp, Mus musculus; identical to SEQ ID NO: 3976
  misc_feature (293)..(293): n is a, c, g, or t

SEQ ID NO: 3978 - DNA, 409 bp, Mus musculus
  misc_feature (87)..(87): n is a, c, g, or t
  misc_feature (116)..(116): n is a, c, g, or t
  misc_feature (120)..(121): n is a, c, g, or t
  misc_feature (124)..(125): n is a, c, g, or t
  misc_feature (127)..(127): n is a, c, g, or t
  misc_feature (129)..(129): n is a, c, g, or t
  misc_feature (192)..(193): n is a, c, g, or t
  misc_feature (345)..(345): n is a, c, g, or t
  misc_feature (356)..(356): n is a, c, g, or t
  misc_feature (358)..(358): n is a, c, g, or t
  misc_feature (360)..(361): n is a, c, g, or t
agcaacacatcctgggttgcttgcatttagtgtctcctcggcttgctatgttgtagctgtctgtgctcagagaactccaatggtgantcgttcccatgcccgacttcaaggtgatntccnnctnntncncctccttctttttgttccacacctgccttgtggcccttcttctggacactcatctgccttgtnntgaacgtgttcccctgggtgggatcagaagtccagcattcctgttttctctgcatatacactggccattctgccttttattaaccattcagagataattggggaacattccttacactgcataagtacagaatttcttcaaaattcatgacnatgcacatgtncngnncgtgtactagatctcaggtcacagaaatcagcagctgaatacagtagt

SEQ ID NO: 3979 - DNA, 409 bp, Mus musculus; identical to SEQ ID NO: 3978
  misc_feature (87)..(87): n is a, c, g, or t
  misc_feature (116)..(116): n is a, c, g, or t
  misc_feature (120)..(121): n is a, c, g, or t
  misc_feature (124)..(125): n is a, c, g, or t
  misc_feature (127)..(127): n is a, c, g, or t
  misc_feature (129)..(129): n is a, c, g, or t
  misc_feature (192)..(193): n is a, c, g, or t
  misc_feature (345)..(345): n is a, c, g, or t
  misc_feature (356)..(356): n is a, c, g, or t
  misc_feature (358)..(358): n is a, c, g, or t
  misc_feature (360)..(361): n is a, c, g, or t

SEQ ID NO: 3980 - DNA, 483 bp, Mus musculus
tttggaatcctgaggcatttcctcagggctctgagttgcagctttgggtcagcgccctcttgaactgccggtttcattacaacaaccatatgcttccctactcactccctgacctcccccccttcctcctctctcccacaccctaacccttcccctctctttttctggactcttttggcttttttgtgtctccacccactaatcccagaagagtctcttaagtgttcagagcagatcgcccaatcatttctcaaaagctaacttagtagaaattgcttaagctttttgatattaagtggagtaaacattttaatttgaccccatatcccacgacagcttaacatgacggtatagaaaaggtaggaaatttaaactctcacaagttggcaagaatattaccattttgcccgcacttggcattgtcaacaagggtccattcactggaggggtcatcggtctccataaagacaggaccaatacttg

SEQ ID NO: 3981 - DNA, 483 bp, Mus musculus; identical to SEQ ID NO: 3980

SEQ ID NO: 3982 - DNA, 552 bp, Mus musculus
  misc_feature (91)..(91): n is a, c, g, or t
  misc_feature (94)..(94): n is a, c, g, or t
  misc_feature (107)..(108): n is a, c, g, or t
  misc_feature (127)..(127): n is a, c, g, or t
  misc_feature (129)..(129): n is a, c, g, or t
  misc_feature (132)..(132): n is a, c, g, or t
  misc_feature (143)..(143): n is a, c, g, or t
  misc_feature (151)..(151): n is a, c, g, or t
  misc_feature (248)..(248): n is a, c, g, or t
  misc_feature (302)..(302): n is a, c, g, or t
  misc_feature (319)..(319): n is a, c, g, or t
  misc_feature (321)..(321): n is a, c, g, or t
  misc_feature (338)..(352): n is a, c, g, or t
  misc_feature (367)..(367): n is a, c, g, or t
  misc_feature (377)..(377): n is a, c, g, or t
  misc_feature (441)..(441): n is a, c, g, or t
  misc_feature (445)..(488): n is a, c, g, or t
  misc_feature (491)..(491): n is a, c, g, or t
  misc_feature (514)..(514): n is a, c, g, or t
  misc_feature (516)..(516): n is a, c, g, or t
gcgaacaccgagatctactcacacaccccacaccttcgcagattgaccaccactagtcctcagacaccacgaagagacctggagaaggtcntancaggagaagaaanngctcttagacctggagatncnggnttctgtgcccntgcaagantcccaatgccatcaaacaaggactatgttgtcaggcccaagtggaatgtagaaatggagtcatccaggtttcaggcatcctccaagaaaggtatcantcgactggataaacagatgagaaagttcacagatatcaggaaaaaaagcagatntgcacatgcagtgaaantnagcatcgagggcaatannnnnnnnnnnnnnncttgcctgggacgtntccccatctntaaaagaaagaaatgcacagtggactatggagaaagaagataattttaaatgtcttagtgtgtntctnnnnnnnnnnnnnnnnnnnnnnnnnnnnnnnnnnnnnnnnnnnnctntccgttgtatttaagaccagttntntgctttgtacagaagagtacttactactcctgcttc

SEQ ID NO: 3983 - DNA, 552 bp, Mus musculus; identical to SEQ ID NO: 3982
  misc_feature (91)..(91): n is a, c, g, or t
  misc_feature (94)..(94): n is a, c, g, or t
  misc_feature (107)..(108): n is a, c, g, or t
  misc_feature (127)..(127): n is a, c, g, or t
  misc_feature (129)..(129): n is a, c, g, or t
  misc_feature (132)..(132): n is a, c, g, or t
  misc_feature (143)..(143): n is a, c, g, or t
  misc_feature (151)..(151): n is a, c, g, or t
  misc_feature (248)..(248): n is a, c, g, or t
  misc_feature (302)..(302): n is a, c, g, or t
  misc_feature (319)..(319): n is a, c, g, or t
  misc_feature (321)..(321): n is a, c, g, or t
  misc_feature (338)..(352): n is a, c, g, or t
  misc_feature (367)..(367): n is a, c, g, or t
  misc_feature (377)..(377): n is a, c, g, or t
  misc_feature (441)..(441): n is a, c, g, or t
  misc_feature (445)..(488): n is a, c, g, or t
  misc_feature (491)..(491): n is a, c, g, or t
  misc_feature (514)..(514): n is a, c, g, or t
  misc_feature (516)..(516): n is a, c, g, or t

SEQ ID NO: 3984 - DNA, 393 bp, Mus musculus
  misc_feature (30)..(30): n is a, c, g, or t
  misc_feature (48)..(48): n is a, c, g, or t
ttctcaaagctctggccctaggagccaagnccgtttttgtgggaaganccatcatctggggcttggctttccagggggagaaaggtgttcaagatgtcctcgagatattgaaggaagaattccgactggccatggctctgagtgggtgccagaatgtgaaagtcatcgacaagacattggtgaggaaaaatcctttggctgtttccaagatctgacagtgcacaatattttcccatctgtattattttttttccagcgtggattacttgacaaagagacactgtgcagagggtgaccacagactgtaactccccacttctatacaaagggtgtcgttcttttccaacaaaatagccaccccttttccttcattgcttttgacttttcaatggg

SEQ ID NO: 3985 - DNA, 393 bp, Mus musculus; identical to SEQ ID NO: 3984
  misc_feature (30)..(30): n is a, c, g, or t
  misc_feature (48)..(48): n is a, c, g, or t

SEQ ID NO: 3986 - DNA, 266 bp, Mus musculus
  misc_feature (35)..(35): n is a, c, g, or t
  misc_feature (232)..(232): n is a, c, g, or t
  misc_feature (240)..(240): n is a, c, g, or t
gtcacaatatgctgttttatcattgagcaaagccnactcagggacacagacagccctaatatttgttcctttaaatcaacaaaggcttctggtcttcttgagaaggggaataacagagcaaggcagaggtcaagctaagtgtggggatttgtcttgccctggtgtgtctttgttcaggtatcaatttgttcccgggtggtctgataggtctattaaatagaaaccattcatngtagaccnaagggttgtctgtgatgtttctcttc

SEQ ID NO: 3987 - DNA, 266 bp, Mus musculus; identical to SEQ ID NO: 3986
  misc_feature (35)..(35): n is a, c, g, or t
  misc_feature (232)..(232): n is a, c, g, or t
  misc_feature (240)..(240): n is a, c, g, or t

SEQ ID NO: 3988 - DNA, 333 bp, Mus musculus
  misc_feature (166)..(166): n is a, c, g, or t
  misc_feature (174)..(174): n is a, c, g, or t
  misc_feature (191)..(191): n is a, c, g, or t
  misc_feature (236)..(236): n is a, c, g, or t
  misc_feature (242)..(242): n is a, c, g, or t
aggaggacctgcaccggctcagtcaggatcagtgctaccatggaccctgggaatccagacacagcgacccatttaaaagcctgattctgaaggagaaagaaaagaagaaaaaggagaagaggcaggatggggaacacagagcctccgagggccaggccgcagggcngcccatanctgggcaggaagctctnacgcaggggctgtggtcaggcccccttccaggactaacctcacantgctcnaggctcctcctaggctttgtcacacagggagatttttctatggctgctggctgtggagaagccttagggtttgttagtatgaccggcttgc

SEQ ID NO: 3989 - DNA, 333 bp, Mus musculus; identical to SEQ ID NO: 3988
  misc_feature (166)..(166): n is a, c, g, or t
  misc_feature (174)..(174): n is a, c, g, or t
  misc_feature (191)..(191): n is a, c, g, or t
  misc_feature (236)..(236): n is a, c, g, or t
  misc_feature (242)..(242): n is a, c, g, or t

SEQ ID NO: 3990 - DNA, 495 bp, Mus musculus
  misc_feature (216)..(216): n is a, c, g, or t
  misc_feature (219)..(219): n is a, c, g, or t
  misc_feature (221)..(221): n is a, c, g, or t
  misc_feature (321)..(365): n is a, c, g, or t
  misc_feature (370)..(371): n is a, c, g, or t
  misc_feature (373)..(373): n is a, c, g, or t
  misc_feature (375)..(376): n is a, c, g, or t
  misc_feature (378)..(378): n is a, c, g, or t
  misc_feature (380)..(385): n is a, c, g, or t
  misc_feature (387)..(388): n is a, c, g, or t
  misc_feature (390)..(396): n is a, c, g, or t
  misc_feature (399)..(399): n is a, c, g, or t
  misc_feature (415)..(433): n is a, c, g, or t
gcgaatacaccaaagaaaccagctcataaaatatgatcattaacgaactgcaaacctcatcttttgaaaacaagggtgtttctttgtaaatatttgtgtttataaatgtacagcagagttaagagtgtttttttagattatttaattcccatatttctaaactatttactacagaataacccctgcttattagtttgggtgacttgattgtttgtnttntntttttttaattcattaccagtcatgcttggagtgacgattctgctggagaggtcagcactctggcagtggctggagtcgcttgtaaagcatgggggagannnnnnnnnnnnnnnnnnnnnnnnnnnnnnnnnnnnnnnnnnnnncgtanntnanngncnnnnnngnncnnnnnnnaanagtttctaacttcccnnnnnnnnnnnnnnnnnnnccagggtggaattgggacaaggctgtttgcccacaaatttagctttcatgtaactcccagtg

SEQ ID NO: 3991 - DNA, 495 bp, Mus musculus; identical to SEQ ID NO: 3990
  misc_feature (216)..(216): n is a, c, g, or t
  misc_feature (219)..(219): n is a, c, g, or t
  misc_feature (221)..(221): n is a, c, g, or t
  misc_feature (321)..(365): n is a, c, g, or t
  misc_feature (370)..(371): n is a, c, g, or t
  misc_feature (373)..(373): n is a, c, g, or t
  misc_feature (375)..(376): n is a, c, g, or t
  misc_feature (378)..(378): n is a, c, g, or t
  misc_feature (380)..(385): n is a, c, g, or t
  misc_feature (387)..(388): n is a, c, g, or t
  misc_feature (390)..(396): n is a, c, g, or t
  misc_feature (399)..(399): n is a, c, g, or t
  misc_feature (415)..(433): n is a, c, g, or t

SEQ ID NO: 3992 - DNA, 282 bp, Mus musculus
  misc_feature (38)..(38): n is a, c, g, or t
  misc_feature (57)..(57): n is a, c, g, or t
  misc_feature (82)..(82): n is a, c, g, or t
  misc_feature (124)..(125): n is a, c, g, or t
atttataggctcacaaaatggttcagtaggtaacggtnagcttgctgctgtgcctgncagcccaagctcaatttcaagaccnagtgatggagagagtggactcctgtgacttttcttgacttcnntatatgacatacatgcacaagcatatataaactcacataaatcaataattataattaaagaaaatcctaaatactttgcaaagatgaaattaaatatccaagaatgttcggtattattcgaaagggttgaaaagcctcggcaactgataaagtctcg

SEQ ID NO: 3993 - DNA, 282 bp, Mus musculus; identical to SEQ ID NO: 3992
  misc_feature (38)..(38): n is a, c, g, or t
  misc_feature (57)..(57): n is a, c, g, or t
  misc_feature (82)..(82): n is a, c, g, or t
  misc_feature (124)..(125): n is a, c, g, or t

SEQ ID NO: 3994 - DNA, 206 bp, Mus musculus
  misc_feature (26)..(26): n is a, c, g, or t
  misc_feature (59)..(59): n is a, c, g, or t
taaccctgagcaccagtcgccatgtntgcgggttcctctctgcatggaagtgccgggcntcattgacagttggaagggctgtttgaaccgtaggaggggagaaaccttgcttccggggctgttctgaataggtggcgtattatcacctttgtcagacgttcattatggctaaccactcggaaggatgctgtgaagctcttgtcttg

SEQ ID NO: 3995 - DNA, 206 bp, Mus musculus; identical to SEQ ID NO: 3994
  misc_feature (26)..(26): n is a, c, g, or t
  misc_feature (59)..(59): n is a, c, g, or t

SEQ ID NO: 3996 - DNA, 513 bp, Mus musculus
  misc_feature (311)..(382): n is a, c, g, or t
gacaatacccgctcaacggtatccttgggggcaaccgacaaccttcatccccaagtcacaacactaatcttcgagctgggagccaagagttctgggccaatggtacccagagtcccatggggcttaacttcgattcacaggaactgtatgattcttttcctgatcagaattttgaggtgatgcccaatggacccccaagttttttcacctcccctcagacttctccaatgttggggtctagtatccagacctttgcaccttcccaggatgtaagcagtgacatccatcctgatgaagcagcagaaaaggannnnnnnnnnnnnnnnnnnnnnnnnnnnnnnnnnnnnnnnnnnnnnnnnnnnnnnnnnnnnnnnnnnnnnnnactaaagatgtgtggctacaatggttctgtctcctctgtggagtctttacaccaagaagtctccgtcctggtccctgatcccacagtgagctgtctagatgatccttcacatcttcctgatcaactggaag

SEQ ID NO: 3997 - DNA, 513 bp, Mus musculus; identical to SEQ ID NO: 3996
  misc_feature (311)..(382): n is a, c, g, or t

SEQ ID NO: 3998 - DNA, 205 bp, Mus musculus
ccactgtgcattttggaaaaaggaagggaggggctctctggggtatggggccactgtcctgtgattctgtctaccaagaccctcagtgtttatggctggtcaggaccagggctgggtctgagttcaccatcagttttgggctatcgtggtgcctgagcttgaagctgggataggaattaggatcaggttgtggtttggactgctc

SEQ ID NO: 3999 - DNA, 205 bp, Mus musculus; identical to SEQ ID NO: 3998

SEQ ID NO: 4000 - DNA, 543 bp, Mus musculus
  misc_feature (84)..(98): n is a, c, g, or t
  misc_feature (190)..(190): n is a, c, g, or t
  misc_feature (240)..(254): n is a, c, g, or t
  misc_feature (295)..(296): n is a, c, g, or t
  misc_feature (298)..(299): n is a, c, g, or t
  misc_feature (301)..(302): n is a, c, g, or t
  misc_feature (304)..(304): n is a, c, g, or t
  misc_feature (307)..(308): n is a, c, g, or t
  misc_feature (310)..(316): n is a, c, g, or t
  misc_feature (318)..(320): n is a, c, g, or t
  misc_feature (372)..(374): n is a, c, g, or t
  misc_feature (376)..(377): n is a, c, g, or t
  misc_feature (379)..(380): n is a, c, g, or t
  misc_feature (382)..(383): n is a, c, g, or t
ggtccaacctttacacattaaagagaataagtagcgtgcatttgatcttaaaaataaccctcatctctcattgttttccataannnnnnnnnnnnnnntccaggtgaaaaggtgttccaggttaaaatctcagcacccgatgagcagttcacgagagttggtgtccaggttttagatcgaaaggacggtntccttcatagtaagatacagaatgtatgccagctacagaaatctgaagannnnnnnnnnnnnnnatgggcaacatgttgccgagtctccttatgttttaagaggnntnntnnancannannnnnnngnnngatttgtatacaaaaaggcatgtcattccatcaataagaattctatcaaaannntnncnnanntttttcactaaatggaaaaaaaaactagatgtttttctaattgaaaactaaattaggcaacttggcaaaagagagatattgattatttacatggggattataattcactaaagaccaagaaacattactagaaaagttgctccttgaggacacacctgtg

SEQ ID NO: 4001 - DNA, 543 bp, Mus musculus; identical to SEQ ID NO: 4000
  misc_feature (84)..(98): n is a, c, g, or t
  misc_feature (190)..(190): n is a, c, g, or t
  misc_feature (240)..(254): n is a, c, g, or t
  misc_feature (295)..(296): n is a, c, g, or t
  misc_feature (298)..(299): n is a, c, g, or t
  misc_feature (301)..(302): n is a, c, g, or t
  misc_feature (304)..(304): n is a, c, g, or t
  misc_feature (307)..(308): n is a, c, g, or t
  misc_feature (310)..(316): n is a, c, g, or t
  misc_feature (318)..(320): n is a, c, g, or t
  misc_feature (372)..(374): n is a, c, g, or t
  misc_feature (376)..(377): n is a, c, g, or t
  misc_feature (379)..(380): n is a, c, g, or t
  misc_feature (382)..(383): n is a, c, g, or t

SEQ ID NO: 4002 - DNA, 330 bp, Mus musculus
  misc_feature (27)..(47): n is a, c, g, or t
  misc_feature (178)..(178): n is a, c, g, or t
  misc_feature (265)..(265): n is a, c, g, or t
  misc_feature (279)..(279): n is a, c, g, or t
ctaaccctgtgacaaacaagtctggcnnnnnnnnnnnnnnnnnnnnnatggagctctgataggtcatacatgaatgtgaacgcaaagacatctcttgcatgcggctgctagctgtgggtaaggctgtcctggaactcctgcagctggctggagagggagagccatggcttccgggagnaagtggggctcctggagcaagtgtcaaagctttacagatccactgttaccttcacgttagcagaagctaaattttgttttttgtttntggttttttgtttnttttaaatagggctgatttgatttgtgggattggtcactgacatggtttgc

SEQ ID NO: 4003 - DNA, 330 bp, Mus musculus; identical to SEQ ID NO: 4002
  misc_feature (27)..(47): n is a, c, g, or t
  misc_feature (178)..(178): n is a, c, g, or t
  misc_feature (265)..(265): n is a, c, g, or t
  misc_feature (279)..(279): n is a, c, g, or t

SEQ ID NO: 4004 - DNA, 591 bp, Mus musculus
  misc_feature (58)..(100): n is a, c, g, or t
  misc_feature (111)..(111): n is a, c, g, or t
  misc_feature (118)..(118): n is a, c, g, or t
  misc_feature (120)..(120): n is a, c, g, or t
  misc_feature (130)..(130): n is a, c, g, or t
  misc_feature (134)..(134): n is a, c, g, or t
  misc_feature (137)..(138): n is a, c, g, or t
  misc_feature (151)..(151): n is a, c, g, or t
  misc_feature (155)..(155): n is a, c, g, or t
  misc_feature (158)..(158): n is a, c, g, or t
  misc_feature (160)..(160): n is a, c, g, or t
  misc_feature (162)..(162): n is a, c, g, or t
  misc_feature (164)..(164): n is a, c, g, or t
  misc_feature (170)..(170): n is a, c, g, or t
  misc_feature (176)..(176): n is a, c, g, or t
  misc_feature (179)..(179): n is a, c, g, or t
  misc_feature (190)..(190): n is a, c, g, or t
  misc_feature (196)..(196): n is a, c, g, or t
  misc_feature (199)..(199): n is a, c, g, or t
  misc_feature (205)..(205): n is a, c, g, or t
  misc_feature (208)..(208): n is a, c, g, or t
  misc_feature (229)..(229): n is a, c, g, or t
  misc_feature (231)..(231): n is a, c, g, or t
  misc_feature (245)..(245): n is a, c, g, or t
  misc_feature (367)..(367): n is a, c, g, or t
  misc_feature (379)..(379): n is a, c, g, or t
  misc_feature (491)..(547): n is a, c, g, or t
gcatcttctaagaaatagagcttgtaagatgcttagcagatcaaggagttcttccttnnnnnnnnnnnnnnnnnnnnnnnnnnnnnnnnnnnnnnnnnnncctagtgctanggtttcngnctttataacntctnctnncctggacctagtntcanggntncngnctttanaacctnttntagcctggacntagtgncanggtttntgntctttataacctcttctagcncnggacctagtgtcanggtttctgtctttataacctcttctagcctggacctagtgtcatggtttctgtctttataacctcttctagcctggacctagtgtcatgttttctgtctttataacctcttctagcctgganctagtgtcatgntttctgtctttataacctcttctagcctggacctagtgtcatgttttctgtctttataacctcttctagcctggacctagtgtcatgttttctgtctttataacctcttctnnnnnnnnnnnnnnnnnnnnnnnnnnnnnnnnnnnnnnnnnnnnnnnnnnnnnnnnngaccaagagttctttgtggtaggagtctgacatcagtcaccaga

SEQ ID NO: 4005 - DNA, 591 bp, Mus musculus; identical to SEQ ID NO: 4004
  misc_feature (58)..(100): n is a, c, g, or t
  misc_feature (111)..(111): n is a, c, g, or t
  misc_feature (118)..(118): n is a, c, g, or t
  misc_feature (120)..(120): n is a, c, g, or t
  misc_feature (130)..(130): n is a, c, g, or t
  misc_feature (134)..(134): n is a, c, g, or t
  misc_feature (137)..(138): n is a, c, g, or t
  misc_feature (151)..(151): n is a, c, g, or t
  misc_feature (155)..(155): n is a, c, g, or t
  misc_feature (158)..(158): n is a, c, g, or t
  misc_feature (160)..(160): n is a, c, g, or t
  misc_feature (162)..(162): n is a, c, g, or t
  misc_feature (164)..(164): n is a, c, g, or t
  misc_feature (170)..(170): n is a, c, g, or t
  misc_feature (176)..(176): n is a, c, g, or t
  misc_feature (179)..(179): n is a, c, g, or t
  misc_feature (190)..(190): n is a, c, g, or t
  misc_feature (196)..(196): n is a, c, g, or t
  misc_feature (199)..(199): n is a, c, g, or t
  misc_feature (205)..(205): n is a, c, g, or t
  misc_feature (208)..(208): n is a, c, g, or t
  misc_feature (229)..(229): n is a, c, g, or t
  misc_feature (231)..(231): n is a, c, g, or t
  misc_feature (245)..(245): n is a, c, g, or t
  misc_feature (367)..(367): n is a, c, g, or t
  misc_feature (379)..(379): n is a, c, g, or t
  misc_feature (491)..(547): n is a, c, g, or t

SEQ ID NO: 4006 - DNA, 417 bp, Mus musculus
  misc_feature (302)..(302): n is a, c, g, or t
  misc_feature (311)..(311): n is a, c, g, or t
  misc_feature (323)..(323): n is a, c, g, or t
gcttcaaggcattttagggaaaacaaatggttttagtagataaggagagcctattaatgttggggttttgttttgtttccaaacaaacacaggaacatttttttactatagatttggtttttaatggatttttttaaaataataatcataagatagcaaagctcggggacatggggttttttccccctgattttttcaagataccaagtaagtggctaacaatattttttttaattcgttccagtcaggattttttaaatactatattgcctaatttacaccagccaaaaaactgcctcttntccattgtntctcctcctgtnagatcaacacttcatttttaacactacactagattcactgtggttggaactcactgcctaacttaactccctctaccttgtaattgatgattgt

SEQ ID NO: 4007 - DNA, 417 bp, Mus musculus; identical to SEQ ID NO: 4006
  misc_feature (302)..(302): n is a, c, g, or t
  misc_feature (311)..(311): n is a, c, g, or t
  misc_feature (323)..(323): n is a, c, g, or t

SEQ ID NO: 4008 - DNA, 506 bp, Mus musculus
  misc_feature (405)..(428): n is a, c, g, or t
  misc_feature (451)..(451): n is a, c, g, or t
aaagggacattgctgactcaatattaatgttgctccttatacattaagggtaaggtgcatggtggtttccttttttaaaaatccatgaatttaggcaaaagtatgctttttccttattagggaaataaaatgtcggaattttgaaaggtggctcagaatccattatatctacataagccaaagtaggcctgcaggggacacaacagccatctgtgtgcaggtttctgcacacatctaatgagtctcagctgcacggggctgggtgtgtatgtctcctatagtccttagctctgtcccactgcataccttgttaaacgtatagttataagtatttttctctgctgtgggcattacagttttgtaaaagctaatggataaaaagcatccgagtagagaggttctttnnnnnnnnnnnnnnnnnnnnnnnntactcagttattgagagtaaaanagaaaaaagaaaggcgctgttagatgtaggagagttcaaacctgaaatttgcaag

SEQ ID NO: 4009 - DNA, 506 bp, Mus musculus; identical to SEQ ID NO: 4008
  misc_feature (405)..(428): n is a, c, g, or t
  misc_feature (451)..(451): n is a, c, g, or t

SEQ ID NO: 4010 - DNA, 405 bp, Mus musculus
  misc_feature (86)..(180): n is a, c, g, or t
  misc_feature (310)..(310): n is a, c, g, or t
cttcctttctgtctgaatgtgtctgtctgtctttctgtctgtctgtctttctttctttttttgtttgtttttgtttttcagttatnnnnnnnnnnnnnnnnnnnnnnnnnnnnnnnnnnnnnnnnnnnnnnnnnnnnnnnnnnnnnnnnnnnnnnnnnnnnnnnnnnnnnnnnnnnnnnncagcccgtctctttcttaagacatggcactgcactccctctgcccttaatttcaaaaggaagagggacccaggctctaatagctggaccaaatagaagatgagttcgggaatggtgtgggtgatactgantccagggcatagaattatatctccacgccaaatccatgacctctagctaaaaggtgaatggggtccccagtgacatccacggagaccacttaaac

SEQ ID NO: 4011 - DNA, 405 bp, Mus musculus; identical to SEQ ID NO: 4010
  misc_feature (86)..(180): n is a, c, g, or t
  misc_feature (310)..(310): n is a, c, g, or t

SEQ ID NO: 4012 - DNA, 482 bp, Mus musculus
  misc_feature (29)..(29): n is a, c, g, or t
  misc_feature (39)..(39): n is a, c, g, or t
  misc_feature (54)..(69): n is a, c, g, or t
  misc_feature (377)..(402): n is a, c, g, or t
taagaaagcaggtgcggtgctcagatctnttaaataatntagtttatggtgcannnnnnnnnnnnnnnnctgtgtcctgatcagcaaaatgaataaccttactttaaccctttctcgggaagagaactagaaagtaagggcactgatttgggattggagacctaaggaattagcacccttgcttggtgattatacttcacctgtttctctgaggtcatcacattcacccaatgccactgtcaaaaagaaaaacagcttgagaaacttgcagattcagtagacagttgaagatcaaacagattctgattttcctttttcttcatatttcctataccaagcccttgtctaaacccttgagtgctgagagctaaggcagnnnnnnnnnnnnnnnnnnnnnnnnnnactcttgactgaaggacagagggcacccaaatcctttaccttatgtgccaaggctccaacagacaagattattggtacct

SEQ ID NO: 4013 - DNA, 482 bp, Mus musculus; identical to SEQ ID NO: 4012
  misc_feature (29)..(29): n is a, c, g, or t
  misc_feature (39)..(39): n is a, c, g, or t
  misc_feature (54)..(69): n is a, c, g, or t
  misc_feature (377)..(402): n is a, c, g, or t

SEQ ID NO: 4014 - DNA, 305 bp, Mus musculus
  misc_feature (263)..(263): n is a, c, g, or t
gaaactttcagaatcttcaggactcttaaagcacatttgaatttattttggtaagaattttgttttgtggatacacgttgaattctgttttttttttaattaaacacaaagtgtagctttcaaggagggagggagagtagccggtggtcccagagcgtgctgctgctgttttattaacataggggaagatgtatataaatagataaagattaccataaattccatgaacttaaatctgtgattcattgccttaagactttctntcttagaatttccataccgcatgccaaaccagtaaaatggct

SEQ ID NO: 4015 - DNA, 305 bp, Mus musculus; identical to SEQ ID NO: 4014
  misc_feature (263)..(263): n is a, c, g, or t

SEQ ID NO: 4016 - DNA, 430 bp, Mus musculus
tgagaaatgcgctggccaaccagagtgactgtgtcctgcatcggatcctgggggacttcctagtagctgtgaacgagtaccaggaagcgatggaccagtacagtatagcactgaggtaggtgctcggcctccacgggagggaaagagaggaggcagggcctgtgtggcaggtctgcaaacacgcgtgcccacagttgaaggcaggatgagaatagtaacgagagaaggtgtttgtgaattcatgactcctgacatattttcctaaagcacattagcggagttatccttcttccccagcccacatccgagcagcacccaggctgactgtacagctctcctgtgcttgcccacaccccatggcttcagagggttacgtctagtggagattttacagtctgctttttaaaatctattgctaagtatgttcctg

SEQ ID NO: 4017 - DNA, 430 bp, Mus musculus; identical to SEQ ID NO: 4016

SEQ ID NO: 4018 - DNA, 494 bp, Mus musculus
  misc_feature (276)..(277): n is a, c, g, or t
  misc_feature (279)..(279): n is a, c, g, or t
gactgtttaggtttacatgaccctcttctctttcccttaccccagacatgtatatatacatatataagatatgtatatatttgacctttataaaatatatatatatgcacatatatgtatctatatccctttgtttgtctgctaaaactggccatgaaagagggagctgccttcaatctgtagtttgagaagatgccagggagcagcagaaacggaggctattgtatattaatttagactttttcactaaaaagaacatgaatgaatttgcttgcnnangaggaaccagttctctagactccatgctcactctacaaggccagctttggtcaagctgccactggggcctgaagagctgactctgtcctaccttattccactaaagtaccatcttgataatttccccttaaaaaatattctcaaaaatgtactggaaagtgggtggcaggagcttgtacagttcagcttccaacatttcggaacagatttaaaag

SEQ ID NO: 4019 - DNA, 494 bp, Mus musculus; identical to SEQ ID NO: 4018
  misc_feature (276)..(277): n is a, c, g, or t
  misc_feature (279)..(279): n is a, c, g, or t

SEQ ID NO: 4020 - DNA, 337 bp, Mus musculus
  misc_feature (131)..(131): n is a, c, g, or t
  misc_feature (138)..(141): n is a, c, g, or t
  misc_feature (152)..(152): n is a, c, g, or t
  misc_feature (157)..(157): n is a, c, g, or t
  misc_feature (177)..(177): n is a, c, g, or t
  misc_feature (179)..(179): n is a, c, g, or t
  misc_feature (188)..(188): n is a, c, g, or t
  misc_feature (204)..(204): n is a, c, g, or t
  misc_feature (219)..(219): n is a, c, g, or t
  misc_feature (306)..(306): n is a, c, g, or t
catactcttgatgtgaagtgcatttaaatgtttgttggcttgttgcagtgctgtagaaagcagctaataattggtgtgaggatgactgtgactttgctcacagcagctcccagtgaagatgagtccatttnttcaggnnnnctgacactacngattntaagagtgaacaggggtcantnttcctttancattgcagtgacaccntagtcttgaatatantcttcccatggagagagagagtgagtgtgtatgtgagagagagtgtgagtgtgtgggtatgggtgtgagggagagataccatatttntttttcaggtaaatgcagtcttccttataaa

SEQ ID NO: 4021 - DNA, 337 bp, Mus musculus; identical to SEQ ID NO: 4020
  misc_feature (131)..(131): n is a, c, g, or t
  misc_feature (138)..(141): n is a, c, g, or t
  misc_feature (152)..(152): n is a, c, g, or t
  misc_feature (157)..(157): n is a, c, g, or t
  misc_feature (177)..(177): n is a, c, g, or t
  misc_feature (179)..(179): n is a, c, g, or t
  misc_feature (188)..(188): n is a, c, g, or t
  misc_feature (204)..(204): n is a, c, g, or t
  misc_feature (219)..(219): n is a, c, g, or t
  misc_feature (306)..(306): n is a, c, g, or t

SEQ ID NO: 4022 - DNA, 446 bp, Mus musculus
  misc_feature (93)..(108): n is a, c, g, or t
tgtttcggaaagtcaatgtgcctgttcttggtcttgtccaaaacatgagtgtcttccagtgtccaaaatgtaaacacaaaactcatatttttnnnnnnnnnnnnnnnngaaaactagcacagacccttgatcttgatgttctaggagatgttcccttgcacctcagtataagggaagcttcggatatgggtcaaccagttgtcttttctcagcctggaagtgatgaggccaaagcttacctgcatattgcttccgaagtggtgagaagattgaagtcatctccagaatgattcccgagtgccctggaaattgtcctggtatttgacaatcatgaactgtcaaacatgagtattgtggtcgtgtggaacccacaaaaataatgacaattctgattattttctttcatctctaaagaaataatgtctcattttcagatttgatttgac

SEQ ID NO: 4023 - DNA, 446 bp, Mus musculus; identical to SEQ ID NO: 4022
  misc_feature (93)..(108): n is a, c, g, or t

SEQ ID NO: 4024 - DNA, 532 bp, Mus musculus
  misc_feature (86)..(169): n is a, c, g, or t
  misc_feature (375)..(389): n is a, c, g, or t
gcagctgagacatcccgaattggtgaccacggagagctaatgtccccagctcccgcagatctgcaggtcatacgcccacattcttnnnnnnnnnnnnnnnnnnnnnnnnnnnnnnnnnnnnnnnnnnnnnnnnnnnnnnnnnnnnnnnnnnnnnnnnnnnnnnnnnnnntgtctctctctaaatgctaacatttctccaccaccaaggcatagtcacaacatgctttgagactgtagactcctggtatcctaagagaaggaattgtaaccaccgcactgagtcctcgctttcacgccgtacctgacttgtcagtttgtagccaaacaaccaatactaagctttgaatggtgctaatcagagtttaggaattctcnnnnnnnnnnnnnnncccttcctccccaggtgatgtaggatatttagaccatagttagactgttagtgaatagtggtgtcctcaaaattttactttgtaattcttcaaaattgattatttttaatgtctatatgaagaaaacccttcagatctttgat

SEQ ID NO: 4025 - DNA, 532 bp, Mus musculus; identical to SEQ ID NO: 4024
  misc_feature (86)..(169): n is a, c, g, or t
  misc_feature (375)..(389): n is a, c, g, or t

SEQ ID NO: 4026 - DNA, 443 bp, Mus musculus
  misc_feature (74)..(115): n is a, c, g, or t
  misc_feature (263)..(337): n is a, c, g, or t
  misc_feature (372)..(390): n is a, c, g, or t
  misc_feature (399)..(399): n is a, c, g, or t
  misc_feature (411)..(411): n is a, c, g, or t
tcaccgttgaaaagaactggtgattagctttggcactgtgtaagcagtggctgaagggtttaaattgtatttannnnnnnnnnnnnnnnnnnnnnnnnnnnnnnnnnnnnnnnnngtgtctgtgtgtacatgtaacttggaatttccttcttccctgccagttttcatagaccagcttattgcatcaaatgaaggtagacactttctgctggaacatcaagtataagacatcaaaatgccagaaaatagcttttttacctgcnnnnnnnnnnnnnnnnnnnnnnnnnnnnnnnnnnnnnnnnnnnnnnnnnnnnnnnnnnnnnnnnnnnnnnnnnnntagctacttttaaagagcctaacaatcatggcagnnnnnnnnnnnnnnnnnnntacgttaangagccccacctntctttcatttctcaaagaacttatctgagagg

SEQ ID NO: 4027 - DNA, 443 bp, Mus musculus; identical to SEQ ID NO: 4026
  misc_feature (74)..(115): n is a, c, g, or t
  misc_feature (263)..(337): n is a, c, g, or t
  misc_feature (372)..(390): n is a, c, g, or t
  misc_feature (399)..(399): n is a, c, g, or t
  misc_feature (411)..(411): n is a, c, g, or t

SEQ ID NO: 4028 - DNA, 446 bp, Mus musculus
  misc_feature (316)..(345): n is a, c, g, or t
  misc_feature (390)..(421): n is a, c, g, or t
ccagctcagagatgggaagtgactacctcaagtcacagagttgtgtggctgaacagtccctctgtccaaggtcaagagtagttcggggatgggaggcaactgggcaggtaaaacccacctgatgaaaggagggaaccaagtcccacaggttggtctctaacagacacgtgagcattgtggcatgaatgcattccacttgccctgagacagaaatgtaaataaataagttaatgtaaacttttttaaaaagttttttgcagagtgctttgccaggctggggatgttgctagagtacctgcctcacatgcacggagcnnnnnnnnnnnnnnnnnnnnnnnnnnnnnngtggtgaccagtgcctacaatctcagcacttgggagagcttagannnnnnnnnnnnnnnnnnnnnnnnnnnnnnnntctactccttagtagctgtgtgaga

SEQ ID NO: 4029 - DNA, 446 bp, Mus musculus; identical to SEQ ID NO: 4028
  misc_feature (316)..(345): n is a, c, g, or t
  misc_feature (390)..(421): n is a, c, g, or t

SEQ ID NO: 4030 - DNA, 422 bp, Mus musculus
  misc_feature (91)..(110): n is a, c, g, or t
  misc_feature (140)..(140): n is a, c, g, or t
  misc_feature (145)..(145): n is a, c, g, or t
gtgttatgaccctgagataatattctgtgaaggacgatctaaccccgcctgaggctggggcattgtctgacagcatttgtttggatccacnnnnnnnnnnnnnnnnnnnngttgctgcaaacagggctgaggcggcctgnctggnccaagttatcacttggctcctttgaaaacaggtggcgtctaatgataagtcatctgacatcaagaaagaaaactgaggctgatattttgttgtttatttatttctgataagttttattctttatgtactgttctttaaaaccagttttatttccctagttcagctattggtacttgtagatttccccagacctttaatttcttagcagactcctgactgatttaggtttctgtgaacatcataaatgagttccccttgccttccatcaagtgacgtt

SEQ ID NO: 4031 - DNA, 422 bp, Mus musculus; identical to SEQ ID NO: 4030
  misc_feature (91)..(110): n is a, c, g, or t
  misc_feature (140)..(140): n is a, c, g, or t
  misc_feature (145)..(145): n is a, c, g, or t

SEQ ID NO: 4032 - DNA, 517 bp, Mus musculus
  misc_feature (26)..(26): n is a, c, g, or t
  misc_feature (48)..(114): n is a, c, g, or t
  misc_feature (186)..(186): n is a, c, g, or t
ggcctgtgccagaattctcattcagntgagaaccagacagaccggcannnnnnnnnnnnnnnnnnnnnnnnnnnnnnnnnnnnnnnnnnnnnnnnnnnnnnnnnnnnnnnnnnnagggctcatatgaaaatggatcccgtgtgacacattttcacgtcgtggcttctatgtcgcctgggagcggancccctggggatacagggaggggtaggcgctaaccactagacccccaccttcaaacttgcatgaagggaatgcctgtctgacagcagggccagcagctgtctcttcccctccagtcccttttgcttgttctttaagccaaaaccaaaacaaccaaaccttttccatacaggaatccagccctgttccgtagcaatacaaagataagcggaaggacctgggggggtggaggcaccccagcacaaaagcaatgccacgaactgacagactgctgttacaagcactccgttcctgtgataaactactatattataaagtgacatccagcccaagt

SEQ ID NO: 4033 - DNA, 517 bp, Mus musculus; identical to SEQ ID NO: 4032
  misc_feature (26)..(26): n is a, c, g, or t
  misc_feature (48)..(114): n is a, c, g, or t
  misc_feature (186)..(186): n is a, c, g, or t

SEQ ID NO: 4034 - DNA, 407 bp, Mus musculus
  misc_feature (33)..(33): n is a, c, g, or t
  misc_feature (113)..(114): n is a, c, g, or t
  misc_feature (124)..(142): n is a, c, g, or t
  misc_feature (199)..(199): n is a, c, g, or t
  misc_feature (264)..(269): n is a, c, g, or t
  misc_feature (271)..(277): n is a, c, g, or t
  misc_feature (279)..(279): n is a, c, g, or t
  misc_feature (281)..(281): n is a, c, g, or t
  misc_feature (283)..(295): n is a, c, g, or t
  misc_feature (297)..(301): n is a, c, g, or t
tagaggaccgcgacctcttgcctcgcgcggagncctctgccgaccttttggtgaacctgagtcgctgtcggcgtctcatcgtggttctttcagatgccttcctaagccggccnnggtgtagccnnnnnnnnnnnnnnnnnnngtgccgcctactggagctcacccgcagacctatcttcatcacctttgagggccagangcgtgagcccatacaccctgctctccggctcctgcgccagcaccgccacctcgtgaccctggtgnnnnnnannnnnnncncngnnnnnnnnnnnnntnnnnntaggagagagccacggcagtgaaatggatgtctctgacctcggctctcgaaactacagtgcacggacagacttctactgcctcgtgtctgaggatgatgtgtagcc

SEQ ID NO: 4035 - DNA, 407 bp, Mus musculus; identical to SEQ ID NO: 4034
  misc_feature (33)..(33): n is a, c, g, or t
  misc_feature (113)..(114): n is a, c, g, or t
  misc_feature (124)..(142): n is a, c, g, or t
  misc_feature (199)..(199): n is a, c, g, or t
  misc_feature (264)..(269): n is a, c, g, or t
  misc_feature (271)..(277): n is a, c, g, or t
  misc_feature (279)..(279): n is a, c, g, or t
  misc_feature (281)..(281): n is a, c, g, or t
  misc_feature (283)..(295): n is a, c, g, or t
  misc_feature (297)..(301): n is a, c, g, or t

SEQ ID NO: 4036 - DNA, 322 bp, Mus musculus
  misc_feature (108)..(108): n is a, c, g, or t
  misc_feature (188)..(189): n is a, c, g, or t
  misc_feature (199)..(217): n is a, c, g, or t
  misc_feature (274)..(274): n is a, c, g, or t
gcccagaggaccgcaaatttgtaaattttattctgaagcctcagttggagcggcgtcggggatacaaactcttcctagaggaccgcgacctcttgcctcgcgcggagncctctgccgaccttttggtgaacctgagtcgctgtcggcgtctcatcgtggttctttcagatgccttcctaagccggccnnggtgtagccnnnnnnnnnnnnnnnnnnngtgccgcctactggagctcacccgcagacctatcttcatcacctttgagggccagangcgtgagcccatacaccctgctctccggctcctgcgccagcaccgcca

SEQ ID NO: 4037 - DNA, 322 bp, Mus musculus; identical to SEQ ID NO: 4036
  misc_feature (108)..(108): n is a, c, g, or t
  misc_feature (188)..(189): n is a, c, g, or t
  misc_feature (199)..(217): n is a, c, g, or t
  misc_feature (274)..(274): n is a, c, g, or t

SEQ ID NO: 4038 - DNA, 354 bp, Mus musculus
cctgtttgcttaggtttgtcattagagaagtggtgtggccatccaggccaaaacacaccataggcgtcactgcctttctcaccaaatgctgattctgatgtttcttctgtgggtgaagccactgcactggggacggggagggtgttcagtgttaacttttgtgccaactatagatcataatgtcattgctatcctaacacagagaacataaaaacaggtgacagtggcaggcacttgtaccttaagatggatgtggatagctggttatacagacaattctgcctcagattaagatctctggtttcagtgtttggaccagtcaggccttcccatctgttgggaagctcagaaaca

SEQ ID NO: 4039 - DNA, 354 bp, Mus musculus; identical to SEQ ID NO: 4038

SEQ ID NO: 4040 - DNA, 286 bp, Mus musculus
ggttcattcttctttaggtccatccactcttttgggtaaatcagttcacaagatacacggtttcacgtggtcctttcaaatcttaatttaaagagggggaaaaggttttttttttttctttaagggcccagcaaatttatcgtgttcatttttgacagctaaaacaagtcttcaccttttcctgtcgaatgcctgtgaagcagctggtttttaaaagtagtatgaggtttaagaaggaagtgctcctcatacccaactttttgttgataactacatacatgttggc

SEQ ID NO: 4041 - DNA, 286 bp, Mus musculus; identical to SEQ ID NO: 4040

SEQ ID NO: 4042 - DNA, 518 bp, Mus musculus
  misc_feature (173)..(173): n is a, c, g, or t
  misc_feature (175)..(175): n is a, c, g, or t
  misc_feature (211)..(211): n is a, c, g, or t
  misc_feature (222)..(222): n is a, c, g, or t
  misc_feature (226)..(226): n is a, c, g, or t
  misc_feature (237)..(237): n is a, c, g, or t
  misc_feature (242)..(242): n is a, c, g, or t
  misc_feature (246)..(247): n is a, c, g, or t
  misc_feature (249)..(249): n is a, c, g, or t
  misc_feature (251)..(251): n is a, c, g, or t
  misc_feature (259)..(261): n is a, c, g, or t
  misc_feature (271)..(271): n is a, c, g, or t
  misc_feature (274)..(274): n is a, c, g, or t
  misc_feature (278)..(278): n is a, c, g, or t
  misc_feature (286)..(286): n is a, c, g, or t
  misc_feature (288)..(288): n is a, c, g, or t
  misc_feature (295)..(295): n is a, c, g, or t
  misc_feature (298)..(298): n is a, c, g, or t
  misc_feature (301)..(301): n is a, c, g, or t
  misc_feature (304)..(304): n is a, c, g, or t
  misc_feature (317)..(317): n is a, c, g, or t
  misc_feature (321)..(321): n is a, c, g, or t
  misc_feature (425)..(443): n is a, c, g, or t
caacatgattgaggagcaggtggcagctctggagcaggcagcctacaagctcgatgcttattcaaaaaaactggaagccaagtacaagaagttggagaagcgatgagaatcgtgttcatgtggctcaagtgtttgttaatatggaagatgttttataaccactaagtcctgangntgacacatcatcagagctcctcagaagaaaatggcntggttaagccnaagnccacgcaatantggantganntngngggccgtnnntgctccggangtntccnctgaggtngnacctctnagnaantcncaccttgggagcncctnaccggtttatttgaatgcttcatacccatcctaagatgggggcatgtagaattcagggggtcctcggggtttccaataaatccccttaggggggcctttctccnnnnnnnnnnnnnnnnnnntgccctttaaaaaggcgtgtgttgttgtgtggtttctcggaaagtgagtttcagccttttaaagggaccctggag

SEQ ID NO: 4043 - DNA, 518 bp, Mus musculus; identical to SEQ ID NO: 4042
  misc_feature (173)..(173): n is a, c, g, or t
  misc_feature (175)..(175): n is a, c, g, or t
  misc_feature (211)..(211): n is a, c, g, or t
  misc_feature (222)..(222): n is a, c, g, or t
  misc_feature (226)..(226): n is a, c, g, or t
  misc_feature (237)..(237): n is a, c, g, or t
  misc_feature (242)..(242): n is a, c, g, or t
  misc_feature (246)..(247): n is a, c, g, or t
  misc_feature (249)..(249): n is a, c, g, or t
  misc_feature (251)..(251): n is a, c, g, or t
  misc_feature (259)..(261): n is a, c, g, or t
  misc_feature (271)..(271): n is a, c, g, or t
  misc_feature (274)..(274): n is a, c, g, or t
  misc_feature (278)..(278): n is a, c, g, or t
  misc_feature (286)..(286): n is a, c, g, or t
  misc_feature (288)..(288): n is a, c, g, or t
  misc_feature (295)..(295): n is a, c, g, or t
  misc_feature (298)..(298): n is a, c, g, or t
  misc_feature (301)..(301): n is a, c, g, or t
  misc_feature (304)..(304): n is a, c, g, or t
  misc_feature (317)..(317): n is a, c, g, or t
  misc_feature (321)..(321): n is a, c, g, or t
  misc_feature (425)..(443): n is a, c, g, or t

SEQ ID NO: 4044 - DNA, 618 bp, Mus musculus
  misc_feature (98)..(115): n is a, c, g, or t
  misc_feature (200)..(200): n is a, c, g, or t
  misc_feature (203)..(207): n is a, c, g, or t
  misc_feature (213)..(214): n is a, c, g, or t
  misc_feature (216)..(237): n is a, c, g, or t
  misc_feature (242)..(242): n is a, c, g, or t
  misc_feature (299)..(299): n is a, c, g, or t
  misc_feature (311)..(311): n is a, c, g, or t
  misc_feature (325)..(325): n is a, c, g, or t
  misc_feature (442)..(442): n is a, c, g, or t
  misc_feature (448)..(448): n is a, c, g, or t
  misc_feature (452)..(452): n is a, c, g, or t
  misc_feature (459)..(459): n is a, c, g, or t
cagaaccatcgctggccagggagcgtgtggcactcgggcttaatcagatctgtcataattaccattctgcatgtttctgacacacgctgtgaaatatnnnnnnnnnnnnnnnnnnaccagcacaaccagatgtagtgcgagtgtggctgcattggaaatattattccgcagataaactctctcctcctcctcttccctcnccnnnnncctccnncnnnnnnnnnnnnnnnnnnnnnntatcntgtaaatcttgaatgtagcgctagattgataacaggcgattagacagtttaaccacnaaacagcttgtncatttttcacaaantgaaaaccacatgtggtggaactaaaatttcaaccccttttttttgtaagggttggggtatgtgtatgtgtggaagatgtccttaaataacaataaaatgagcaatccaaagaagtnaagtgnttangaaaaanggagacattgcctagtttccctccagatttatcaaaacctcatcatattcccttttacactttaaccaaaactcaaatgggaaaaagattgtggtctctggtgggctttcaggatgttgtatttaaaaaaaaaaaaacttttgctccattggtctgtaa

SEQ ID NO: 4045 - DNA, 618 bp, Mus musculus; identical to SEQ ID NO: 4044
  misc_feature (98)..(115): n is a, c, g, or t
  misc_feature (200)..(200): n is a, c, g, or t
  misc_feature (203)..(207): n is a, c, g, or t
  misc_feature (213)..(214): n is a, c, g, or t
  misc_feature (216)..(237): n is a, c, g, or t
  misc_feature (242)..(242): n is a, c, g, or t
  misc_feature (299)..(299): n is a, c, g, or t
  misc_feature (311)..(311): n is a, c, g, or t
  misc_feature (325)..(325): n is a, c, g, or t
  misc_feature (442)..(442): n is a, c, g, or t
  misc_feature (448)..(448): n is a, c, g, or t
  misc_feature (452)..(452): n is a, c, g, or t
  misc_feature (459)..(459): n is a, c, g, or t

SEQ ID NO: 4046 - DNA, 517 bp, Mus musculus
  misc_feature (37)..(55): n is a, c, g, or t
  misc_feature (270)..(300): n is a, c, g, or t
  misc_feature (437)..(451): n is a, c, g, or t
  misc_feature (460)..(460): n is a, c, g, or t
  misc_feature (463)..(463): n is a, c, g, or t
gatcaacaggcaacttaagcaaatctttcagaattgnnnnnnnnnnnnnnnnnnnaatacttcgctctactctgtttaaaacaatcttttaaaaacgttgtgtgtacatgtatatttgggtatgcatgtatgtgtgtatatggtgtatgtgcgtggtgtacacacatgtgtatgcaggagccagaagagaaagtcaggcacccttttctattgcactccactttattctgttaagggaaggtctctcattgaacctggagctctgctagnnnnnnnnnnnnnnnnnnnnnnnnnnnnnnnccctgacccccacattgctagactatatttgctcatgcccagctttttacaaggatgtggagaactgaaattcaggtcctcatgattgcataacaagcactctcacttactaagcatgttctaatatgttttacaannnnnnnnnnnnnnnaagatttcnccncaatgaatgatcaattctgtttgtaccttgtttgccaatcacatagcatttatg

SEQ ID NO: 4047 - DNA, 517 bp, Mus musculus; identical to SEQ ID NO: 4046
  misc_feature (37)..(55): n is a, c, g, or t
  misc_feature (270)..(300): n is a, c, g, or t
  misc_feature (437)..(451): n is a, c, g, or t
  misc_feature (460)..(460): n is a, c, g, or t
  misc_feature (463)..(463): n is a, c, g, or t

SEQ ID NO: 4048 - DNA, 320 bp, Mus musculus
  misc_feature (58)..(101): n is a, c, g, or t
  misc_feature (105)..(105): n is a, c, g, or t
  misc_feature (147)..(147): n is a, c, g, or t
  misc_feature (176)..(176): n is a, c, g, or t
  misc_feature (178)..(178): n is a, c, g, or t
  misc_feature (272)..(272): n is a, c, g, or t
  misc_feature (280)..(280): n is a, c, g, or t
  misc_feature (284)..(284): n is a, c, g, or t
taagccgcagtgcttgtctcatatttaagcctctcgtagataagggagcagtatgggnnnnnnnnnnnnnnnnnnnnnnnnnnnnnnnnnnnnnnnnnnnnagcnagagataaaagtttctacaagaaccttagaaacgttcattanggaaatagaacgtatatcaccttggtacncntgttcagggtcgttaactctttcctcttgggagaaattaagggaagacttagctaagaaacaacagaatgggaaattaaaggcagggaccatgncattatgnaaantggtgagatcgtgcctggaggatgagagatgccatc

SEQ ID NO: 4049 - DNA, 320 bp, Mus musculus; identical to SEQ ID NO: 4048
  misc_feature (58)..(101): n is a, c, g, or t
  misc_feature (105)..(105): n is a, c, g, or t
  misc_feature (147)..(147): n is a, c, g, or t
  misc_feature (176)..(176): n is a, c, g, or t
  misc_feature (178)..(178): n is a, c, g, or t
  misc_feature (272)..(272): n is a, c, g, or t
  misc_feature (280)..(280): n is a, c, g, or t
  misc_feature (284)..(284): n is a, c, g, or t

SEQ ID NO: 4050 - DNA, 466 bp, Mus musculus
  misc_feature (245)..(245): n is a, c, g, or t
  misc_feature (305)..(305): n is a, c, g, or t
aatgttcagcaggagtggagtgctcgaggtctctgggttctgactcgtctactgctgatactgttcttcatggcagactaaatgaaatgacagaagcagaaactcaaactgtggagccagcaagcatgtcattagccactcactcactgcatctggatttatctctgacacttcacacagcatcactgacttggacaaagcacaactaggacacatgaatatccagagcgcctctgcttcagcanagttgctatatgtagaaatgagcatgtgctgcgtttggctctctaagaaggtggctcgcntagaacctcattcagttgggaccctgcagctcaccatgactacagcagtgggagcagctcgtggcctcagtcagcaggcggtggctgagagctgtcctggacacttttcactttgctgccttttttgtttttagtggagaaagattcctgggcttcttcca

SEQ ID NO: 4051 - DNA, 466 bp, Mus musculus; identical to SEQ ID NO: 4050
  misc_feature (245)..(245): n is a, c, g, or t
  misc_feature (305)..(305): n is a, c, g, or t

SEQ ID NO: 4052 - DNA, 373 bp, Mus musculus
  misc_feature (63)..(63): n is a, c, g, or t
  misc_feature (67)..(67): n is a, c, g, or t
  misc_feature (74)..(74): n is a, c, g, or t
ggtactctccagagaggctctccacctcccactcctgaggctgtttatttccatttattctcnttgnccctctnggtcttctctcatgcctcctctgccccatatctgttttccttttcctctctccctcctctctcccactgatctccctccctccttctgccttctgtgattatttctttctcccttctaaatggggttgaagcctccatagatcctggctcaataattaaagtggatggcacatgaagaaacccacctaaggtcttaaagtgtacctttggccctccataatcatgattttacctgtgcaaacatgtgccctttccccacgacaatttgaaacgtagattagacccatcagaataaacag

SEQ ID NO: 4053 - DNA, 373 bp, Mus musculus; identical to SEQ ID NO: 4052
  misc_feature (63)..(63): n is a, c, g, or t
  misc_feature (67)..(67): n is a, c, g, or t
  misc_feature (74)..(74): n is a, c, g, or t

SEQ ID NO: 4054 - DNA, 405 bp, Mus musculus
gcattcgagactcatccagtttttttagttgagctttttgggaattttacatggagtggggatggggaggcgttgtgttattgttttgaggcagggtctcaccatgtgtgaactcccaactccaccccaggaacctggatttttttcttcttctttcttgggacttcctcctatattggagccaatctaacctttccatagccctctcttgggccctctctggagctctagctcctgtcccaagctctttaaaaaaaaaaaaaaaaaaaaaaaaaacctcatctttgggtagaccaatgagctggctcggtggataaagcctgatgtttgttggatccctggagctgtcctatagaggagagccaggacctgcaaagtgcctccggcctctacatgtgctgcagg

SEQ ID NO: 4055 - DNA, 405 bp, Mus musculus; identical to SEQ ID NO: 4054

SEQ ID NO: 4056 - DNA, 482 bp, Mus musculus
catgcacaggcgtaaattatctatcaaggagctattaaacaaagccccgctgctgcttcacctttctttgcccaggtcagccttccctctgcaccgcactgctggctcctcccttaaacctcagcctccggtctgtccttggctcaggctgcctcccttgttctcctgtagcctgaggaggtagcaatttcatcaatgcccaggttaatttgaaagaccaatctggcttctttatggcctctaattattcagcaatcatctaggtgtgactggaaaggaattttgtgggtgtaattaccatttttaattggtcagttttaatgaaaggattatcctagttgatctgttagcaggtgcttggaaccaaactgaggctgccctggagacgaaagtcaccttgagtgcaggaagggcagctggccttgcccgctgcctgccctggggtgggttaagggggtgtctactggcctcggtggatccca

SEQ ID NO: 4057 - DNA, 482 bp, Mus musculus; identical to SEQ ID NO: 4056

SEQ ID NO: 4058 - DNA, 286 bp, Mus musculus
  misc_feature (37)..(37): n is a, c, g, or t
  misc_feature (39)..(47): n is a, c, g, or t
  misc_feature (49)..(50): n is a, c, g, or t
  misc_feature (67)..(68): n is a, c, g, or t
  misc_feature (73)..(73): n is a, c, g, or t
  misc_feature (75)..(75): n is a, c, g, or t
  misc_feature (169)..(169): n is a, c, g, or t
  misc_feature (226)..(226): n is a, c, g, or t
gggatgagccacgtcaagtaacttttttttaaccctntnnnnnnnnntnnctggggcaactgcatgnngacancntcctgcgccttctgggaagcatgaaagccaggagtgacagtcagtactcaggtgcaggtcagcttcctgtatcctcacggtgcttaggggctcnggaacactgtatgtttcagtacaggaaactgcggggcagaacttaagaggtatttgnaacagcagggactttcctaattaactttggttgcgtagacacttttctacttattgttgg

SEQ ID NO: 4059 - DNA, 286 bp, Mus musculus; identical to SEQ ID NO: 4058
  misc_feature (37)..(37): n is a, c, g, or t
  misc_feature (39)..(47): n is a, c, g, or t
  misc_feature (49)..(50): n is a, c, g, or t
  misc_feature (67)..(68): n is a, c, g, or t
  misc_feature (73)..(73): n is a, c, g, or t
  misc_feature (75)..(75): n is a, c, g, or t
  misc_feature (169)..(169): n is a, c, g, or t
  misc_feature (226)..(226): n is a, c, g, or t

SEQ ID NO: 4060 - DNA, 400 bp, Mus musculus
  misc_feature (44)..(44): n is a, c, g, or t
  misc_feature (70)..(70): n is a, c, g, or t
  misc_feature (84)..(84): n is a, c, g, or t
  misc_feature (158)..(158): n is a, c, g, or t
accactgagaattggtgtgacagtgtcctgtggctggctgagcntggcattacaagagtgggcaccagcnactgtccccgaggnccgaagtacagccagccttgcttggtttgatcgccatttaaggaagatgaggtagttccaaaaagcagcgaacnccgccagcagttttaaagtctaacacattttaaacggatccaaagtcttctttcctcatccgtcacttagcagttgagcatctccattcggttgtgaagcatgtcgtaggcacactgcagtgttacgatcggaatgcttttcattaaaagcaggtagcatgaagtattgcttaaattttaggtataaataaatatatatatgtataatatatattccactgtattccaagctaagaaacttg

SEQ ID NO: 4061 - DNA, 400 bp, Mus musculus; identical to SEQ ID NO: 4060
  misc_feature (44)..(44): n is a, c, g, or t
  misc_feature (70)..(70): n is a, c, g, or t
  misc_feature (84)..(84): n is a, c, g, or t
  misc_feature (158)..(158): n is a, c, g, or t

SEQ ID NO: 4062 - DNA, 542 bp, Mus musculus
  misc_feature (285)..(285): n is a, c, g, or t
  misc_feature (303)..(303): n is a, c, g, or t
  misc_feature (314)..(314): n is a, c, g, or t
gttgacacactctgcacaaacactgacccttctcacagaccctgaaagagctcagggagtggcctgacatggagcagggctactcagaggcccatttgtggggcctgcctcggcttgtgtagcaagctcactccgactgtagcagcagcagagttgcccaactcaatccccaagtggatgtcagtgcctggcactccagggttaccttctgtcagcagcagtgtgggtatggctgcctctgctgcagacactccatgggcaagggctgtggaaagttcttctccnctgagagtgactccagancacaaggatangatcctctttcacgcttcttagattcaaaagtaccaaatcagttttcaaagtcagatttactccttttaattgtattttattaaaaaccatctactaaccgaagaatatttataaagtgagtataataagctataattagtgaaaatggaataaatacccacatcccacaggtgaactttaaaaatagagcacagggctgggactagaatagcacagggattggcact

SEQ ID NO: 4063 - DNA, 542 bp, Mus musculus; identical to SEQ ID NO: 4062
  misc_feature (285)..(285): n is a, c, g, or t
  misc_feature (303)..(303): n is a, c, g, or t
  misc_feature (314)..(314): n is a, c, g, or t

SEQ ID NO: 4064 - DNA, 175 bp, Mus musculus
  misc_feature (37)..(37): n is a, c, g, or t
  misc_feature (39)..(42): n is a, c, g, or t
  misc_feature (48)..(48): n is a, c, g, or t
  misc_feature (54)..(54): n is a, c, g, or t
  misc_feature (59)..(59): n is a, c, g, or t
  misc_feature (62)..(62): n is a, c, g, or t
  misc_feature (68)..(68): n is a, c, g, or t
  misc_feature (73)..(73): n is a, c, g, or t
  misc_feature (87)..(87): n is a, c, g, or t
  misc_feature (92)..(92): n is a, c, g, or t
  misc_feature (98)..(102): n is a, c, g, or t
  misc_feature (104)..(105): n is a, c, g, or t
  misc_feature (107)..(107): n is a, c, g, or t
  misc_feature (109)..(115): n is a, c, g, or t
  misc_feature (117)..(117): n is a, c, g, or t
  misc_feature (121)..(129): n is a, c, g, or t
  misc_feature (131)..(137): n is a, c, g, or t
  misc_feature (143)..(143): n is a, c, g, or t
  misc_feature (146)..(147): n is a, c, g, or t
tctgcccacaggttccaaggtaccaggagttatgggncnnnncttagnggaaantgtcngcnttccgnccccntcgttctggtgaancgttnggagannnnnannanannnnnnntnaaannnnnnnnnannnnnnnttttangannttacagatccaaagacatagagtgatgt

SEQ ID NO: 4065 - DNA, 175 bp, Mus musculus; identical to SEQ ID NO: 4064
  misc_feature (37)..(37): n is a, c, g, or t
  misc_feature (39)..(42): n is a, c, g, or t
  misc_feature (48)..(48): n is a, c, g, or t
  misc_feature (54)..(54): n is a, c, g, or t
  misc_feature (59)..(59): n is a, c, g, or t
  misc_feature (62)..(62): n is a, c, g, or t
  misc_feature (68)..(68): n is a, c, g, or t
  misc_feature (73)..(73): n is a, c, g, or t
  misc_feature (87)..(87): n is a, c, g, or t
  misc_feature (92)..(92): n is a, c, g, or t
  misc_feature (98)..(102): n is a, c, g, or t
  misc_feature (104)..(105): n is a, c, g, or t
  misc_feature (107)..(107): n is a, c, g, or t
  misc_feature (109)..(115): n is a, c, g, or t
  misc_feature (117)..(117): n is a, c, g, or t
  misc_feature (121)..(129): n is a, c, g, or t
  misc_feature (131)..(137): n is a, c, g, or t
  misc_feature (143)..(143): n is a, c, g, or t
  misc_feature (146)..(147): n is a, c, g, or t

SEQ ID NO: 4066 - DNA, 57 bp, Mus musculus
ctgtttctgggctctgttactagctgccaaatgcaaatcttaactgatagaaaagtc

SEQ ID NO: 4067 - DNA, 57 bp, Mus musculus; identical to SEQ ID NO: 4066

SEQ ID NO: 4068 - DNA, 129 bp, Mus musculus
gtcaggggctgtcgttccacccaggtcagtctcactttggcttgctcccactgtggctgctgtgctggctcctggcctccctgtgctccagcacacggctttctggaggcacacgctgcctcactgcag

SEQ ID NO: 4069 - DNA, 129 bp, Mus musculus; identical to SEQ ID NO: 4068

SEQ ID NO: 4070 - DNA, 290 bp, Mus musculus
  misc_feature (230)..(230): n is a, c, g, or t
  misc_feature (242)..(242): n is a, c, g, or t
  misc_feature (246)..(246): n is a, c, g, or t
  misc_feature (262)..(262): n is a, c, g, or t
  misc_feature (265)..(265): n is a, c, g, or t
tcagccaatgaattacattatgcagataaaccttcggtgttattagaaagtagaaaactacctttgttatctagggcttggaaggacttatctaaagtacttagtagtttaccatgatttttgtgtttctgataagactctttaatgtcagaatctcttaccatgagtaaatatttggattatttaaatctagactattggttcttcccagagtttagagatgggaagtntagataatattntaanttattgaagataggtnttntaaatcatacaaagactgggctatt

SEQ ID NO: 4071 - DNA, 290 bp, Mus musculus; identical to SEQ ID NO: 4070
  misc_feature (230)..(230): n is a, c, g, or t
  misc_feature (242)..(242): n is a, c, g, or t
  misc_feature (246)..(246): n is a, c, g, or t
  misc_feature (262)..(262): n is a, c, g, or t
  misc_feature (265)..(265): n is a, c, g, or t

SEQ ID NO: 4072 - DNA, 454 bp, Mus musculus
  misc_feature (32)..(32): n is a, c, g, or t
  misc_feature (35)..(37): n is a, c, g, or t
  misc_feature (85)..(85): n is a, c, g, or t
  misc_feature (89)..(90): n is a, c, g, or t
  misc_feature (95)..(95): n is a, c, g, or t
  misc_feature (97)..(98): n is a, c, g, or t
  misc_feature (100)..(100): n is a, c, g, or t
  misc_feature (105)..(105): n is a, c, g, or t
  misc_feature (107)..(108): n is a, c, g, or t
  misc_feature (115)..(115): n is a, c, g, or t
  misc_feature (126)..(126): n is a, c, g, or t
  misc_feature (128)..(129): n is a, c, g, or t
  misc_feature (136)..(136): n is a, c, g, or t
  misc_feature (139)..(139): n is a, c, g, or t
  misc_feature (142)..(142): n is a, c, g, or t
  misc_feature (158)..(158): n is a, c, g, or t
  misc_feature (162)..(162): n is a, c, g, or t
  misc_feature (164)..(164): n is a, c, g, or t
  misc_feature (167)..(167): n is a, c, g, or t
  misc_feature (169)..(169): n is a, c, g, or t
  misc_feature (180)..(180): n is a, c, g, or t
  misc_feature (187)..(187): n is a, c, g, or t
  misc_feature (189)..(190): n is a, c, g, or t
  misc_feature (197)..(197): n is a, c, g, or t
  misc_feature (200)..(200): n is a, c, g, or t
  misc_feature (202)..(202): n is a, c, g, or t
  misc_feature (228)..(228): n is a, c, g, or t
  misc_feature (231)..(231): n is a, c, g, or t
  misc_feature (233)..(233): n is a, c, g, or t
  misc_feature (236)..(236): n is a, c, g, or t
  misc_feature (247)..(247): n is a, c, g, or t
  misc_feature (288)..(288): n is a, c, g, or t
  misc_feature (343)..(343): n is a, c, g, or t
  misc_feature (347)..(347): n is a, c, g, or t
  misc_feature (349)..(359): n is a, c, g, or t
  misc_feature (396)..(396): n is a, c, g, or t
  misc_feature (400)..(400): n is a, c, g, or t
  misc_feature (421)..(421): n is a, c, g, or t
tggatttcttttacctttctgtgaagcagctntgnnnggcatacatgtatttaaaaacacaaatagtggtaggatggtttggttntttnnttttntnntnttttntnntttacanttttaacttancnngtggtgntgnagnattaccatagatccantttntnttntncactaagatgngaggaantnntgatttnttntntccagcacagtgaaattacaccttcntcntnttntattgtttggnaaacactgcagtttaccatgggacactgtatatatttcttnccgtaatggtaaatgactgattgatatatttaagagttaataaatttgtgatttntgcngnnnnnnnnnnnatttttatttcttaagaaatactctatgtgtggtgcnggcnactgccaaggacatgatgtcntgccctggtctccttcaataaacaacttgcagt

SEQ ID NO: 4073 - DNA, 454 bp, Mus musculus; identical to SEQ ID NO: 4072
  misc_feature (32)..(32): n is a, c, g, or t
  misc_feature (35)..(37): n is a, c, g, or t
  misc_feature (85)..(85): n is a, c, g, or t
  misc_feature (89)..(90): n is a, c, g, or t
  misc_feature (95)..(95): n is a, c, g, or t
  misc_feature (97)..(98): n is a, c, g, or t
  misc_feature (100)..(100): n is a, c, g, or t
  misc_feature (105)..(105): n is a, c, g, or t
  misc_feature (107)..(108): n is a, c, g, or t
  misc_feature (115)..(115): n is a, c, g, or t
  misc_feature (126)..(126): n is a, c, g, or t
  misc_feature (128)..(129): n is a, c, g, or t
  misc_feature (136)..(136): n is a, c, g, or t
  misc_feature (139)..(139): n is a, c, g, or t
  misc_feature (142)..(142): n is a, c, g, or t
  misc_feature (158)..(158): n is a, c, g, or t
  misc_feature (162)..(162): n is a, c, g, or t
  misc_feature (164)..(164): n is a, c, g, or t
  misc_feature (167)..(167): n is a, c, g, or t
  misc_feature (169)..(169): n is a, c, g, or t
  misc_feature (180)..(180): n is a, c, g, or t
  misc_feature (187)..(187): n is a, c, g, or t
  misc_feature (189)..(190): n is a, c, g, or t
  misc_feature (197)..(197): n is a, c, g, or t
  misc_feature (200)..(200): n is a, c, g, or t
  misc_feature (202)..(202): n is a, c, g, or t
  misc_feature (228)..(228): n is a, c, g, or t
  misc_feature (231)..(231): n is a, c, g, or t
  misc_feature (233)..(233): n is a, c, g, or t
  misc_feature (236)..(236): n is a, c, g, or t
  misc_feature (247)..(247): n is a, c, g, or t
  misc_feature (288)..(288): n is a, c, g, or t
  misc_feature (343)..(343): n is a, c, g, or t
  misc_feature (347)..(347): n is a, c, g, or t
  misc_feature (349)..(359): n is a, c, g, or t
  misc_feature (396)..(396): n is a, c, g, or t
  misc_feature (400)..(400): n is a, c, g, or t
  misc_feature (421)..(421): n is a, c, g, or t

SEQ ID NO: 4074 - DNA, 259 bp, Mus musculus
  misc_feature (26)..(30): n is a, c, g, or t
  misc_feature (32)..(33): n is a, c, g, or t
  misc_feature (35)..(41): n is a, c, g, or t
ccccgtgccactagagaacatctgannnnnanngnnnnnnngaagacatttggaaggccctagttctgggacaagagtaaagtccacttggctgatgctacaagatccatggccagactcattctcatgactactacagccaacccagggaccgcccttcaggtggagccctgggtcccctgcagctctgagtagcagcaggatgtctaccttctaccctctgcaggagtctcccatagataaggctcgcccaaagggg

SEQ ID NO: 4075 - DNA, 259 bp, Mus musculus; identical to SEQ ID NO: 4074
  misc_feature (26)..(30): n is a, c, g, or t
  misc_feature (32)..(33): n is a, c, g, or t
  misc_feature (35)..(41): n is a, c, g, or t

SEQ ID NO: 4076 - DNA, 50 bp, Mus musculus
gtgttttcaggcaaattctgcttctgagcttacttgtttctgattatatc

SEQ ID NO: 4077 - DNA, 50 bp, Mus musculus; identical to SEQ ID NO: 4076

SEQ ID NO: 4078 - DNA, 99 bp, Mus musculus
ctttctgggacaagggagaacagagccttctcacacccccacttcaattctgagtcattgatcagtggtagctgttccctcttggagatgcctgtgtca

SEQ ID NO: 4079 - DNA, 99 bp, Mus musculus; identical to SEQ ID NO: 4078

SEQ ID NO: 4080 - DNA, 282 bp, Mus musculus
  misc_feature (104)..(118): n is a, c, g, or t
agttagcctcttcctcctgggtctctcctggtttcgcctgggctgtggtaagtaatggagctgtgagttcctggatggtgacccggtccaggatcttgaagctnnnnnnnnnnnnnnnaggctggctacagcgctggcacacgaagctcacctgcatggtgctgctggacgccttagacccctccatgcctcaggagcccggagcccgccacccaggctcgttctaccgcgggggcacggtggcctcgggtccgccccggagcgagacctccagagttccca

SEQ ID NO: 4081 - DNA, 282 bp, Mus musculus; identical to SEQ ID NO: 4080
  misc_feature (104)..(118): n is a, c, g, or t

SEQ ID NO: 4082 - DNA, 550 bp, Mus musculus
  misc_feature (57)..(57): n is a, c, g, or t
  misc_feature (83)..(83): n is a, c, g, or t
  misc_feature (120)..(171): n is a, c, g, or t
  misc_feature (411)..(411): n is a, c, g, or t
cctggaagctcttgattatgatagttcagatgacagtgattttaaagttggagatgnttcagattctgaagggagtggtaatngaagtgaagatccttcaaaggacagtggagaaggttnnnnnnnnnnnnnnnnnnnnnnnnnnnnnnnnnnnnnnnnnnnnnnnnnnnntcaagtaaaagaagaacagcttaaaaattctacagaggaaataatgccatcagacaaacagttaattaaaatggaaaagaaggaagaagaagaaaacggagaaagacctagaaagaaaaaggagaaagaaaaggagaaagaaaaggaaagggagaaggacaaagagaaagcaacagtatctgatagtgcagctgcttctgctgctggcaccacaccagccacaagccctcctgctgtcanctccccttctgtccctaccaccactaccaccaccacggaggaacaagtcagtgagcccaagaaatggaatcttcgtcggaaccgtcccctgttggactttgtatccatggaagaactcaatgctatggatgattatgac

SEQ ID NO: 4083 - DNA, 550 bp, Mus musculus; identical to SEQ ID NO: 4082
  misc_feature (57)..(57): n is a, c, g, or t
  misc_feature (83)..(83): n is a, c, g, or t
  misc_feature (120)..(171): n is a, c, g, or t
  misc_feature (411)..(411): n is a, c, g, or t

SEQ ID NO: 4084 - DNA, 286 bp, Mus musculus
  misc_feature (123)..(123): n is a, c, g, or t
  misc_feature (203)..(203): n is a, c, g, or t
  misc_feature (238)..(238): n is a, c, g, or t
tccaaccacagctggggatgagggaggagggctggcctaccctaggcctcagaggtctctgttatccctggttaagtaaaagatcagccaccacagaagagtagagcaggggactgtggtccntgattggatttgggagaagctgcctctggccatttgctgctgtgccttcagggactgacatgtcatacaggggcagaggncaccagctagccactgtctctctcacaggtctcanatgaccaatttaccacttgggtttcactctgtattttgtattcaatgg

SEQ ID NO: 4085 - DNA, 286 bp, Mus musculus; identical to SEQ ID NO: 4084
  misc_feature (123)..(123): n is a, c, g, or t
  misc_feature (203)..(203): n is a, c, g, or t
  misc_feature (238)..(238): n is a, c, g, or t

SEQ ID NO: 4086 - DNA, 558 bp, Mus musculus
  misc_feature (30)..(31): n is a, c, g, or t
  misc_feature (49)..(49): n is a, c, g, or t
  misc_feature (66)..(66): n is a, c, g, or t
  misc_feature (72)..(72): n is a, c, g, or t
  misc_feature (74)..(75): n is a, c, g, or t
  misc_feature (78)..(80): n is a, c, g, or t
  misc_feature (82)..(82): n is a, c, g, or t
  misc_feature (85)..(86): n is a, c, g, or t
  misc_feature (104)..(104): n is a, c, g, or t
  misc_feature (117)..(117): n is a, c, g, or t
  misc_feature (124)..(124): n is a, c, g, or t
  misc_feature (131)..(131): n is a, c, g, or t
  misc_feature (138)..(138): n is a, c, g, or t
  misc_feature (287)..(296): n is a, c, g, or t
  misc_feature (313)..(316): n is a, c, g, or t
tgaggtccctggttctcctcactgcctttnntttttttttttttttttnaaatttgctttgctctnacctgnanntgnnntnttnngagactaaaaagactagnctgcagttgcatntcagaantcgaatntagaaanaaatggcaggaaatactgaattgggttggatcagtgtaaaaacatcaaggaaagcatgttgtacttaaactatgtgctccatccaccccaaccccacttgcaatttccaaatcacacacaaactattaaaatggccattaaaatacgannnnnnnnnnaaaaaaaaaaaaaaaannnngtgtacttacttggtagacagtgtttttcattctaattcagcaaagtcaggagcaccaacttgctgggagacacagctgagccctcagactttatgtcgttgataggtgcccagctctcgacagtctagcccatttctgccacctgaaggtgcagcccttggggaagagcctttcagaagaaccaacacattagtaatttgttcctcaggcctgacagaaggctttgcttccaaatacaaac

SEQ ID NO: 4087 - DNA, 558 bp, Mus musculus; identical to SEQ ID NO: 4086
  misc_feature (30)..(31): n is a, c, g, or t
  misc_feature (49)..(49): n is a, c, g, or t
  misc_feature (66)..(66): n is a, c, g, or t
  misc_feature (72)..(72): n is a, c, g, or t
  misc_feature (74)..(75): n is a, c, g, or t
  misc_feature (78)..(80): n is a, c, g, or t
  misc_feature (82)..(82): n is a, c, g, or t
  misc_feature (85)..(86): n is a, c, g, or t
  misc_feature (104)..(104): n is a, c, g, or t
  misc_feature (117)..(117): n is a, c, g, or t
  misc_feature (124)..(124): n is a, c, g, or t
  misc_feature (131)..(131): n is a, c, g, or t
  misc_feature (138)..(138): n is a, c, g, or t
  misc_feature (287)..(296): n is a, c, g, or t
  misc_feature (313)..(316): n is a, c, g, or t

SEQ ID NO: 4088 - DNA, 88 bp, Mus musculus
tacaatgacactgtgttggggcctccatggccagagcagccctgcacctatgagctattgatccatgttgcagatgtgggcccttcca

SEQ ID NO: 4089 - DNA, 88 bp, Mus musculus; identical to SEQ ID NO: 4088

SEQ ID NO: 4090 - DNA, 209 bp, Mus musculus
  misc_feature (31)..(31): n is a, c, g, or t
  misc_feature (40)..(40): n is a, c, g, or t
  misc_feature (42)..(42): n is a, c, g, or t
  misc_feature (62)..(62): n is a, c, g, or t
  misc_feature (64)..(64): n is a, c, g, or t
  misc_feature (76)..(76): n is a, c, g, or t
  misc_feature (104)..(104): n is a, c, g, or t
  misc_feature (106)..(106): n is a, c, g, or t
  misc_feature (116)..(116): n is a, c, g, or t
  misc_feature (118)..(118): n is a, c, g, or t
  misc_feature (120)..(120): n is a, c, g, or t
  misc_feature (176)..(176): n is a, c, g, or t
ttagcccacatttgggtgagaagacaccaanggtatattntncccagaatattggaataatntntaaattggcttntgtagctatttatacatgatataatttntntccattcagntntntcccaatgatgggcatgttttcccaacagtttccatcaagtccaggattggcccantcattattaccaggcttgcgattggtttggttt

SEQ ID NO: 4091 - DNA, 209 bp, Mus musculus; identical to SEQ ID NO: 4090
  misc_feature (31)..(31): n is a, c, g, or t
  misc_feature (40)..(40): n is a, c, g, or t
  misc_feature (42)..(42): n is a, c, g, or t
  misc_feature (62)..(62): n is a, c, g, or t
  misc_feature (64)..(64): n is a, c, g, or t
  misc_feature (76)..(76): n is a, c, g, or t
  misc_feature (104)..(104): n is a, c, g, or t
  misc_feature (106)..(106): n is a, c, g, or t
  misc_feature (116)..(116): n is a, c, g, or t
  misc_feature (118)..(118): n is a, c, g, or t
  misc_feature (120)..(120): n is a, c, g, or t
  misc_feature (176)..(176): n is a, c, g, or t

SEQ ID NO: 4092 - DNA, 447 bp, Mus musculus
  misc_feature (298)..(305): n is a, c, g, or t
  misc_feature (307)..(310): n is a, c, g, or t
  misc_feature (312)..(312): n is a, c, g, or t
  misc_feature (315)..(317): n is a, c, g, or t
  misc_feature (319)..(319): n is a, c, g, or t
  misc_feature (351)..(383): n is a, c, g, or t
ggacctagacactggcgtgaaagcaggagagcagacctttctgtgtttcatttagttatttatagttaaagttggaataaacattgatctttgatattttttgatcctctataaaatgatttataaatgagttttctattaaaagtgttttaaatggcatataccaaccatacaaataactaaaatgtggatgtgttactttttttcttttgtacctttaagcagtagggtgtttcattttgcactctaaatttagggttatttactttatttggtaattatagcttttgaaatacgnnnnnnnnannnnanaannnantctgtatggatcttcatcatctatttcctttnnnnnnnnnnnnnnnnnnnnnnnnnnnnnnnnnctttaggggttttcagtttattcattaacctgtagatcataccagcttttgacatgcaagtatg

SEQ ID NO: 4093 - DNA, 447 bp, Mus musculus; identical to SEQ ID NO: 4092
  misc_feature (298)..(305): n is a, c, g, or t
  misc_feature (307)..(310): n is a, c, g, or t
  misc_feature (312)..(312): n is a, c, g, or t
  misc_feature (315)..(317): n is a, c, g, or t
  misc_feature (319)..(319): n is a, c, g, or t
  misc_feature (351)..(383): n is a, c, g, or t

SEQ ID NO: 4094 - DNA, 355 bp, Mus musculus
  misc_feature (87)..(89): n is a, c, g, or t
  misc_feature (91)..(92): n is a, c, g, or t
  misc_feature (95)..(107): n is a, c, g, or t
  misc_feature (111)..(114): n is a, c, g, or t
  misc_feature (306)..(306): n is a, c, g, or t
aacatctcccacgtggctgaaggggacaaaccccagcacagagccaccatctgcttgagcaagatggatattgcctgggtcatcgtnnncnncannnnnnnnnnnnnctcnnnngcggtcctgttgacagtgtgctgcatgaggaggaagaagaagacggccaaccctgagaacaacctgagctactggaacaatgccatcacaatggactacttcaacagacacgcggtggagctcccgagggagatccagtccctagagacctcagaggaccagctctcagagccccgctccccagccaatggngactatcgagacactgggatggtcctcgtgaaccccttctgccaggaaa

SEQ ID NO: 4095 - DNA, 355 bp, Mus musculus; identical to SEQ ID NO: 4094
  misc_feature (87)..(89): n is a, c, g, or t
  misc_feature (91)..(92): n is a, c, g, or t
  misc_feature (95)..(107): n is a, c, g, or t
  misc_feature (111)..(114): n is a, c, g, or t
  misc_feature (306)..(306): n is a, c, g, or t

SEQ ID NO: 4096 - DNA, 115 bp, Mus musculus
  misc_feature (64)..(65): n is a, c, g, or t
tgggcttctgctgtaggtaactgctagaggtgagtctgttctgtctatctacctgtctgcgtgnntgccagcttgcctgtctgtctgtctgctcctgatgggattgtgagtcacc

SEQ ID NO: 4097 - DNA, 115 bp, Mus musculus; identical to SEQ ID NO: 4096
  misc_feature (64)..(65): n is a, c, g, or t

SEQ ID NO: 4098 - DNA, 372 bp, Mus musculus
  misc_feature (57)..(74): n is a, c, g, or t
ggaaaagactccagacctggaactgactgcacaaccatgtcaaaagcaaaccctgcnnnnnnnnnnnnnnnnnngctcactggtgtgaagaaagggccggcaagctcagtggactcggctcgcctcacaccttctctggggagacaggctagtgtcggttttgtgtgttctatgctccggatatcttttccccttctgtgggtctgagagaactttttgtttgtttgtttgtttgtttgtttggcagaaggaaactgaccattctaccatgtgcctttgctggcactcgtgcaataaaaatggtgtttggagtgtgcagctgagggagagctggcagctgagtgaggagtggcgttggagacaggcattcaa

SEQ ID NO: 4099 - DNA, 372 bp, Mus musculus; identical to SEQ ID NO: 4098
  misc_feature (57)..(74): n is a, c, g, or t

SEQ ID NO: 4100 - DNA, 108 bp, Mus musculus
ctgctgccttcagagatgttccttattgagtagtgggtgcttctgttccccaaaaggtcactcagctaccctctatgctataccagaatgtgagctttgctcttctga

SEQ ID NO: 4101 - DNA, 108 bp, Mus musculus; identical to SEQ ID NO: 4100

SEQ ID NO: 4102 - DNA, 123 bp, Mus musculus
ctcaaccagagcaagctgctggcctactgcaagatgaatgacattgttctggttgcctatggtgccctgggaactcaaagatacaaatactgtataaatgaggataccccagttctcttggat

SEQ ID NO: 4103 - DNA, 123 bp, Mus musculus; identical to SEQ ID NO: 4102

SEQ ID NO: 4104 - DNA, 329 bp, Mus musculus
  misc_feature (81)..(81): n is a, c, g, or t
  misc_feature (89)..(89): n is a, c, g, or t
  misc_feature (98)..(99): n is a, c, g, or t
  misc_feature (101)..(102): n is a, c, g, or t
  misc_feature (113)..(113): n is a, c, g, or t
  misc_feature (138)..(138): n is a, c, g, or t
  misc_feature (169)..(169): n is a, c, g, or t
  misc_feature (200)..(200): n is a, c, g, or t
  misc_feature (264)..(264): n is a, c, g, or t
aaggggaccattcactcgtaccatttaagatgctgcttgaaggactggagggggattgtcgacgtttgatggagaaacatntactacantattacctnntnntctttgttatnttgcattcaaaaaccgtgttcattntggcttagatctgcccttacattcttgagtntattagacatttaaccacgagacacagcctntcagccattaacagatggaagagacacgacacaggctggctatgtgatggagcagcttcctgtntccattagtgatgtgtgtataacgctacatattcccaactgtcatcatggttaggcgagaaagcc

SEQ ID NO: 4105 - DNA, 329 bp, Mus musculus; identical to SEQ ID NO: 4104
  misc_feature (81)..(81): n is a, c, g, or t
  misc_feature (89)..(89): n is a, c, g, or t
  misc_feature (98)..(99): n is a, c, g, or t
  misc_feature (101)..(102): n is a, c, g, or t
  misc_feature (113)..(113): n is a, c, g, or t
  misc_feature (138)..(138): n is a, c, g, or t
  misc_feature (169)..(169): n is a, c, g, or t
  misc_feature (200)..(200): n is a, c, g, or t
  misc_feature (264)..(264): n is a, c, g, or t

SEQ ID NO: 4106 - DNA, 560 bp, Mus musculus
  misc_feature (26)..(27): n is a, c, g, or t
  misc_feature (32)..(32): n is a, c, g, or t
  misc_feature (34)..(34): n is a, c, g, or t
  misc_feature (43)..(44): n is a, c, g, or t
  misc_feature (48)..(48): n is a, c, g, or t
  misc_feature (56)..(56): n is a, c, g, or t
  misc_feature (67)..(67): n is a, c, g, or t
  misc_feature (85)..(85): n is a, c, g, or t
  misc_feature (87)..(87): n is a, c, g, or t
  misc_feature (92)..(92): n is a, c, g, or t
  misc_feature (283)..(283): n is a, c, g, or t
  misc_feature (333)..(333): n is a, c, g, or t
actgctgtgaagacacccaagcatcnntgcancnggtgcaccnntgcntcgagcgntgccatgcgcntctggctcaagcccaggntntggtnaccagcgagctggaaaggttccaggaccgcctggcccgctgcaccatgcattgcaatgacaaagccaaagactcaatggatgcaggaactaaggagcttcaggtgaagcgacagctagacagctgtgtgaccaagtgtgtggatgaccacatgcacctcatcccaacaatgaccaagaagatgaaggagtntctgtcatccatagggaaataaaattgtttgccagtgaccatcgggactncgggcaggctatttaaaaggaagaatggaagtttaatatgttaagcaatgtttacgaatgaggaaaacttagacacagcaagttccaggcaaatgctgctcactgctggacactagtccctttacattcggatcttagaaggtgaagtaggaagaagctggtgctaagatttggatcacagatagctcagaggagaagtctagatcctaaatattcatatgcaagtg

SEQ ID NO: 4107 - DNA, 560 bp, Mus musculus; identical to SEQ ID NO: 4106
  misc_feature (26)..(27): n is a, c, g, or t
  misc_feature (32)..(32): n is a, c, g, or t
  misc_feature (34)..(34): n is a, c, g, or t
  misc_feature (43)..(44): n is a, c, g, or t
  misc_feature (48)..(48): n is a, c, g, or t
  misc_feature (56)..(56): n is a, c, g, or t
  misc_feature (67)..(67): n is a, c, g, or t
  misc_feature (85)..(85): n is a, c, g, or t
  misc_feature (87)..(87): n is a, c, g, or t
  misc_feature (92)..(92): n is a, c, g, or t
  misc_feature (283)..(283): n is a, c, g, or t
  misc_feature (333)..(333): n is a, c, g, or t

SEQ ID NO: 4108 - DNA, 323 bp, Mus musculus
  misc_feature (90)..(106): n is a, c, g, or t
  misc_feature (116)..(130): n is a, c, g, or t
  misc_feature (166)..(166): n is a, c, g, or t
  misc_feature (196)..(196): n is a, c, g, or t
  misc_feature (204)..(204): n is a, c, g, or t
  misc_feature (282)..(283): n is a, c, g, or t
  misc_feature (285)..(286): n is a, c, g, or t
actcccaaaggtctggctcccagtgcagagccatgcccttgcctgaccctactgagaaagaggaggacatttatgaagtcctaccagtgnnnnnnnnnnnnnnnnnccagggcctnnnnnnnnnnnnnnntgaccagccggatgaactgtccttccaacggggtgnacctcatccgcattctgagcaaggagtacnaacatgtncggctggtgggtaggagagctgaacagcgtcattggaattgttccaaaggactatctcaccaccgcctttgaaatggnngnnatatgaagcccagggaacatattctcagaccatcaga

SEQ ID NO: 4109 - DNA, 323 bp, Mus musculus; identical to SEQ ID NO: 4108
  misc_feature (90)..(106): n is a, c, g, or t
  misc_feature (116)..(130): n is a, c, g, or t
  misc_feature (166)..(166): n is a, c, g, or t
  misc_feature (196)..(196): n is a, c, g, or t
  misc_feature (204)..(204): n is a, c, g, or t
  misc_feature (282)..(283): n is a, c, g, or t
  misc_feature (285)..(286): n is a, c, g, or t

SEQ ID NO: 4110 - DNA, 527 bp, Mus musculus
  misc_feature (26)..(26): n is a, c, g, or t
  misc_feature (29)..(30): n is a, c, g, or t
  misc_feature (32)..(32): n is a, c, g, or t
  misc_feature (34)..(38): n is a, c, g, or t
  misc_feature (40)..(42): n is a, c, g, or t
  misc_feature (45)..(46): n is a, c, g, or t
  misc_feature (48)..(48): n is a, c, g, or t
  misc_feature (58)..(58): n is a, c, g, or t
  misc_feature (62)..(62): n is a, c, g, or t
  misc_feature (70)..(70): n is a, c, g, or t
  misc_feature (85)..(85): n is a, c, g, or t
  misc_feature (98)..(98): n is a, c, g, or t
  misc_feature (132)..(132): n is a, c, g, or t
  misc_feature (142)..(142): n is a, c, g, or t
  misc_feature (156)..(156): n is a, c, g, or t
  misc_feature (179)..(179): n is a, c, g, or t
  misc_feature (204)..(204): n is a, c, g, or t
  misc_feature (385)..(405): n is a, c, g, or t
  misc_feature (447)..(447): n is a, c, g, or t
  misc_feature (473)..(473): n is a, c, g, or t
  misc_feature (475)..(475): n is a, c, g, or t
  misc_feature (481)..(481): n is a, c, g, or t
  misc_feature (496)..(497): n is a, c, g, or t
taatatacacatacggggaagccgantannangnnnnncnnnggnntnccagccggtntacntgtaagcntcagttaaccacaantcgaggaaacccnaaatgagatttcttttcagaagacaaattcaagnttaggaatcnttcatttttagttntggtaaatgggcaacaggaagantcaacatgatttcaaattagccctntgaggaccttcactgcattaaaacagtatttttaaaaaattagtacagtatggaaagagcacttattttgtggatacccatctttttcttactaaattataaggactgactgtgagaaaccatgctgctgttatttccatgtgtgttgtatctgatagcacttgtccacagctagaaaagnnnnnnnnnnnnnnnnnnnnncaagacgtctgtgcaataagagaggatgaggcgacggagctntgctcaagtcacgaggaccgcttatntnacacangtggcttagttttgnnttttcccacatttcaaattgtgatgtaatg

SEQ ID NO: 4111 - DNA, 527 bp, Mus musculus; identical to SEQ ID NO: 4110
  misc_feature (26)..(26): n is a, c, g, or t
  misc_feature (29)..(30): n is a, c, g, or t
  misc_feature (32)..(32): n is a, c, g, or t
  misc_feature (34)..(38): n is a, c, g, or t
  misc_feature (40)..(42): n is a, c, g, or t
  misc_feature (45)..(46): n is a, c, g, or t
  misc_feature (48)..(48): n is a, c, g, or t
  misc_feature (58)..(58): n is a, c, g, or t
  misc_feature (62)..(62): n is a, c, g, or t
  misc_feature (70)..(70): n is a, c, g, or t
  misc_feature (85)..(85): n is a, c, g, or t
  misc_feature (98)..(98): n is a, c, g, or t
  misc_feature (132)..(132): n is a, c, g, or t
  misc_feature (142)..(142): n is a, c, g, or t
  misc_feature (156)..(156): n is a, c, g, or t
  misc_feature (179)..(179): n is a, c, g, or t
  misc_feature (204)..(204): n is a, c, g, or t
  misc_feature (385)..(405): n is a, c, g, or t
  misc_feature (447)..(447): n is a, c, g, or t
  misc_feature (473)..(473): n is a, c, g, or t
  misc_feature (475)..(475): n is a, c, g, or t
  misc_feature (481)..(481): n is a, c, g, or t
  misc_feature (496)..(497): n is a, c, g, or t

SEQ ID NO: 4112 - DNA, 142 bp, Mus musculus
gaagggtcttacttcaatgtctgtttaaagaagctggtgtcttggtgcccttttctttccacttctttccaggccccgacttgtataaccctattcagaccataacttttcttgatagatgacaaagtcagcttccagaaac

SEQ ID NO: 4113 - DNA, 142 bp, Mus musculus; identical to SEQ ID NO: 4112

SEQ ID NO: 4114 - DNA, 323 bp, Mus musculus
  misc_feature (72)..(73): n is a, c, g, or t
  misc_feature (88)..(162): n is a, c, g, or t
  misc_feature (168)..(168): n is a, c, g, or t
  misc_feature (273)..(273): n is a, c, g, or t
gccacataagggagtccttttcaaaccacagactgtcaagtctgcccaatttgggggctgtctcatctagtnngatagtgtgtcaggnnnnnnnnnnnnnnnnnnnnnnnnnnnnnnnnnnnnnnnnnnnnnnnnnnnnnnnnnnnnnnnnnnnnnnnnnnntgtgtnaatggcaggccatggatacaatcctgcaacccaagtatgctaggttgaggtattcttgaggcttcctggcttccaccctggctccaggctccatatgagacgcantcttaagggaatgaggtggagcgcgatggagcagggagctggaaaccctc

SEQ ID NO: 4115 - DNA, 323 bp, Mus musculus; identical to SEQ ID NO: 4114
  misc_feature (72)..(73): n is a, c, g, or t
  misc_feature (88)..(162): n is a, c, g, or t
  misc_feature (168)..(168): n is a, c, g, or t
  misc_feature (273)..(273): n is a, c, g, or t

SEQ ID NO: 4116 - DNA, 363 bp, Mus musculus
  misc_feature (193)..(193): n is a, c, g, or t
  misc_feature (199)..(200): n is a, c, g, or t
  misc_feature (203)..(204): n is a, c, g, or t
  misc_feature (211)..(212): n is a, c, g, or t
  misc_feature (217)..(217): n is a, c, g, or t
  misc_feature (230)..(230): n is a, c, g, or t
  misc_feature (242)..(242): n is a, c, g, or t
  misc_feature (316)..(316): n is a, c, g, or t
gctaactatgtagaagctggctttagattaaatgactatgaagcacaatgacattctgtggactaaaagtttttttgtaatttgaattttttcccccctttttcatgtcctcagtaactcatacctggctttgaattaggagtggctaggagggttctagtctgtgcaaacattaataaaaattattttgaantttagnnttnnaaaatgnntgaantaatttaaaattntcttaattctantcttaatacttcactgtgatgttaacttggaagacctgctgaagattagtcttttaattttagaccattatatntgctgagcacaggattcttatcatttgtaaatctaaaaccgtctgtg

SEQ ID NO: 4117 - DNA, 363 bp, Mus musculus; identical to SEQ ID NO: 4116
  misc_feature (193)..(193): n is a, c, g, or t
  misc_feature (199)..(200): n is a, c, g, or t
  misc_feature (203)..(204): n is a, c, g, or t
  misc_feature (211)..(212): n is a, c, g, or t
  misc_feature (217)..(217): n is a, c, g, or t
  misc_feature (230)..(230): n is a, c, g, or t
  misc_feature (242)..(242): n is a, c, g, or t
  misc_feature (316)..(316): n is a, c, g, or t

SEQ ID NO: 4118 - DNA, 129 bp, Mus musculus
cgtcttctagaatttaacagattgtacttttataatgcctttctccttaatgtagagattatgtactctcatttgatttgaaggtctagccttgccttctagacccactgcactatgagacaaatcatg

SEQ ID NO: 4119 - DNA, 129 bp, Mus musculus; identical to SEQ ID NO: 4118

SEQ ID NO: 4120 - DNA, 139 bp, Mus musculus
aggtaggacagtgcagcttgccctgagtttccttaaacctctgacctatcaccatgctgggctgatttgcccagccaaggatgtctatggattgttagttcactcatctctgcctctagcagggcctgatatcattaag

SEQ ID NO: 4121 - DNA, 139 bp, Mus musculus; identical to SEQ ID NO: 4120

SEQ ID NO: 4122 - DNA, 389 bp, Mus musculus
  misc_feature (171)..(171): n is a, c, g, or t
  misc_feature (180)..(180): n is a, c, g, or t
  misc_feature (182)..(182): n is a, c, g, or t
  misc_feature (205)..(205): n is a, c, g, or t
  misc_feature (209)..(209): n is a, c, g, or t
  misc_feature (212)..(212): n is a, c, g, or t
  misc_feature (337)..(337): n is a, c, g, or t
tttcggcagaggtggattttctgcggatgactctagctagaggttcccaggtagagcagcaggagctcatcagtatggagcaggctctggcatcctctctcagccgacaccctcacttgtgctggaccacaagcagttaacaaatattttgaagacggttgttaaaaaaantcagaaatntnatatattccaactggagaatttntatncantaatcagccagtgtatttatgagcaccgcagggactatgacaaaacagcgcttgttcagaaaatggagcaagcagtagaaaacttcaattgttccagatcatagtcgatacattcaagtactttntcttcagttcctatttaattgtcttcagatatatcatcataactgatgcaag

SEQ ID NO: 4123 - DNA, 389 bp, Mus musculus; identical to SEQ ID NO: 4122
  misc_feature (171)..(171): n is a, c, g, or t
  misc_feature (180)..(180): n is a, c, g, or t
  misc_feature (182)..(182): n is a, c, g, or t
  misc_feature (205)..(205): n is a, c, g, or t
  misc_feature (209)..(209): n is a, c, g, or t
  misc_feature (212)..(212): n is a, c, g, or t
  misc_feature (337)..(337): n is a, c, g, or t

SEQ ID NO: 4124 - DNA, 544 bp, Mus musculus
  misc_feature (26)..(26): n is a, c, g, or t
  misc_feature (364)..(364): n is a, c, g, or t
  misc_feature (435)..(435): n is a, c, g, or t
  misc_feature (437)..(444): n is a, c, g, or t
  misc_feature (446)..(446): n is a, c, g, or t
  misc_feature (474)..(476): n is a, c, g, or t
  misc_feature (478)..(480): n is a, c, g, or t
  misc_feature (483)..(485): n is a, c, g, or t
  misc_feature (487)..(488): n is a, c, g, or t
  misc_feature (490)..(490): n is a, c, g, or t
  misc_feature (494)..(496): n is a, c, g, or t
  misc_feature (498)..(499): n is a, c, g, or t
agtgcacttgtaatcctactgcttgngaggaggaggatttagagcccaaggtcagcctgggctacgaccctgctgtaaaaacaacacaaacaaacaaacaaacaaacaccaccagcttacttacttgcattatctctgttagccatggcgttcatgccaatagtatcaaacttggagcccatattctcatccagcagatggccaaactgaaaaaagaaaggaagggtgggcaaggctattaggaaacttgaaaagaatgtaaacagctactttcttaagttagtacattagcctcacctcctcagcagagacaaacaggctggagtcattgaaacttttcttctttttcttttgtcctaaaganaaattatgtgtaggttactcaaagcatatacttatttttcagatttggtccccgatcaatgtttatctttncnnnnnnnnanaagtatcactcaggcttaaaattccacnnntnnnttnnntnnantttnnnanntgtgaaacaaaatataaattgtaattcatgtcttattctttgggc

SEQ ID NO: 4125 - DNA, 544 bp, Mus musculus; identical to SEQ ID NO: 4124
  misc_feature (26)..(26): n is a, c, g, or t
  misc_feature (364)..(364): n is a, c, g, or t
  misc_feature (435)..(435): n is a, c, g, or t
  misc_feature (437)..(444): n is a, c, g, or t
  misc_feature (446)..(446): n is a, c, g, or t
  misc_feature (474)..(476): n is a, c, g, or t
  misc_feature (478)..(480): n is a, c, g, or t
  misc_feature (483)..(485): n is a, c, g, or t
  misc_feature (487)..(488): n is a, c, g, or t
  misc_feature (490)..(490): n is a, c, g, or t
  misc_feature (494)..(496): n is a, c, g, or t
  misc_feature (498)..(499): n is a, c, g, or t

SEQ ID NO: 4126 - DNA, 262 bp, Mus musculus
cctgcatgtgtgcaaggtatgggatatgttgcggggtcaggaaaaaatcatgttgttctgggccttgcttgttgctttgcttcgacagtgtcctgtagcacaggctggactcaaactccgatgtactcgggtgactgtgatcctgatcctccggcctccacctctgggctgctaggacggcagccttatgccaccacatctggataaaagtcatgattttcttctgttctttcgtgtttcttgggatggaggtcagagcttc

SEQ ID NO: 4127 - DNA, 262 bp, Mus musculus; identical to SEQ ID NO: 4126

SEQ ID NO: 4128 - DNA, 402 bp, Mus musculus
  misc_feature (294)..(311): n is a, c, g, or t
  misc_feature (325)..(339): n is a, c, g, or t
gccaaagaccagagcccaattgttggaaggcggacacactttcctttctaaagggccagtttccggctgccctggataaaataatattgggggtcagaacctgaagggggctgcgtctctatgctgctacacttgtcatcgagtctccaggaggaaagatggaggaggcagaaccacgtcctggcgctttgtatcatctgccttttccttggatttcagccgcactaaaaggcattttgtgcctggggcccacttcctgctgcaggctttggtccaaaaaatgtcaggctttgnnnnnnnnnnnnnnnnnnttaaagtttttgcnnnnnnnnnnnnnnnctttgactcccaagtccttgacattcaacagagcaccaatggaattggccaagtcagcatttc

SEQ ID NO: 4129 - DNA, 168 bp, Mus musculus
aaagctctacctctagctaagcgaatgaagcagttacagcacctaaaggcgcagaacaaacatgaactgagttacagaattccaatacagtcactaagaacaaagtatcagctctaggcaggctgaaggaggaggagttcaaaagcctagacaacttaggaagaacca

SEQ ID NO: 4130 - DNA, 168 bp, Mus musculus; identical to SEQ ID NO: 4129

SEQ ID NO: 4131 - DNA, 168 bp, Mus musculus; identical to SEQ ID NO: 4129

SEQ ID NO: 4132 - DNA, 168 bp, Mus musculus; identical to SEQ ID NO: 4129

SEQ ID NO: 4133 - DNA, 385 bp, Mus musculus
cacggagttttccaagtgagaaaaggggcgtgttatcctcttatccttcagacgcatctcttacagaggcctccgtggctcgcaggacaaattggtgagtcccacggacagccctggtgactgtatggacagagagaaaatagaaaaagactcagggctcagcagcacctcagctggctctgaggaagggttcagcaccccagaagtggccagtagctttagcagtgactataacgtgagctccccagaagacagaccttctcaggaaaccataaactgtggtgacttggactgccgtcctccaggtacaggacagtccttgaagccagaagaccatggatatcaatgcaaagctctacctctagctaagcgaatgaagcagtta

SEQ ID NO: 4134 - DNA, 385 bp, Mus musculus; identical to SEQ ID NO: 4133

SEQ ID NO: 4135 - DNA, 385 bp, Mus musculus; identical to SEQ ID NO: 4133

SEQ ID NO: 4136 - DNA, 385 bp, Mus musculus; identical to SEQ ID NO: 4133

SEQ ID NO: 4137 - DNA, 277 bp, Mus musculus
  misc_feature (104)..(104): n is a, c, g, or t
  misc_feature (139)..(139): n is a, c, g, or t
  misc_feature (163)..(163): n is a, c, g, or t
  misc_feature (180)..(180): n is a, c, g, or t
  misc_feature (188)..(188): n is a, c, g, or t
  misc_feature (194)..(194): n is a, c, g, or t
gttagaattttcatttctggatcctttgagattttagcaaagatggttttattatatactatacatttttctcccacagcaactgggagggaaggggggcaacnatttacaataggatttggattttgagtgtccaaantcaggacccaggagccaagaaggntccttggcctacccatntccccaantccctntgagaaatgattaaacctaccaacaggaataatgggattttgggggttcctttccaaagtggattgttttccttcaacatatt

SEQ ID NO: 4138 - DNA, 61 bp, Mus musculus
cattaggaatcttttcatctccaggagctcggacggtccccctggtggaagggtttagatg

SEQ ID NO: 4139 - DNA, 585 bp, Mus musculus
  misc_feature (414)..(436): n is a, c, g, or t
tgtattcctcaaaagaatgtcaaagtaaatgtattagaaatgcagtatccagcctattagtccttgccagagaccttcgactttctgccacattttgtgtttgacgacagaaagaattctgtccctgttaccagctagcgagacctacaagatgtcaagctggacccaccgtctcgccttcgccctccccacgattcgcctgttgacctggctcacctgctcagctaaatcagctcctttgtcctctgtggcacctgaagctcatgtggagggctttgacatccctgggagctgagcaggagctgttgccttaggtgggccatgtgctcccatagtgtgaggaagaaggagaagatattggaaatggaggagggagtcagcgattcctggctaggaccggctggaccatcaacnnnnnnnnnnnnnnnnnnnnnnntgcagtgcatttgttaaatgtccatccccaggcacaacttggccgagcacacctttgctgcaaagctggataccgagagggttatccatctgtgccaccaccacctccgttcctgcaggatccttcattgtcgatcatgaagccttgag

SEQ ID NO: 4140 - DNA, 585 bp, Mus musculus; identical to SEQ ID NO: 4139
  misc_feature (414)..(436): n is a, c, g, or t

SEQ ID NO: 4141 - DNA, 226 bp, Mus musculus
actcagctttgtcaagccctacctgcccctacttcaggtttccttcaaccactctccatcccaggctgcctctcattggtcaggccttcctcacacacatgtgacactgacccagctccctggagagcgtcactgccagtgggctcagaggaggaggctgccacactgtgtgctcaccctcacagtttccccacagagtttcagtcatgtctgaatgtggtattac

SEQ ID NO: 4142 - DNA, 226 bp, Mus musculus; identical to SEQ ID NO: 4141

SEQ ID NO: 4143 - DNA, 279 bp, Mus musculus
  misc_feature (39)..(105): n is a, c, g, or t
  misc_feature (116)..(132): n is a, c, g, or t
gacaaggtctctccatatatcccagactatccatgaatnnnnnnnnnnnnnnnnnnnnnnnnnnnnnnnnnnnnnnnnnnnnnnnnnnnnnnnnnnnnnnnnnnntcttcctttcnnnnnnnnnnnnnnnnntattatatcagaaaggaggggaatactgggggtctgggaggaggaaacctggggcgaaaaacctgtagcacacaaaacctgtacacactgtctgaaggaagggggtggggagcgctcagtctgctccactctgctgggcggcaagac

SEQ ID NO: 4144 - DNA, 279 bp, Mus musculus; identical to SEQ ID NO: 4143
  misc_feature (39)..(105): n is a, c, g, or t
  misc_feature (116)..(132): n is a, c, g, or t

SEQ ID NO: 4145 - DNA, 422 bp, Mus musculus
  misc_feature (41)..(107): n is a, c, g, or t
  misc_feature (118)..(134): n is a, c, g, or t
  misc_feature (325)..(339): n is a, c, g, or t
gagacaaggtctctccatatatcccagactatccatgaatnnnnnnnnnnnnnnnnnnnnnnnnnnnnnnnnnnnnnnnnnnnnnnnnnnnnnnnnnnnnnnnnnnntcttcctttcnnnnnnnnnnnnnnnnntattatatcagaaaggaggggaatactgggggtctgggaggaggaaacctggggcgaaaaacctgtagcacacaaaacctgtacacactgtctgaaggaagggggtggggagcgctcagtctgctccactctgctgggcggcaagacctagaacgggccctgcactgtcccaccatgggttgtggtctcannnnnnnnnnnnnnngctcttccctggaggctgtgacagagcagccaggaggagccgactaggagtcctggcttccaacctctctgaaggaagcagag

SEQ ID NO: 4146 - DNA, 422 bp, Mus musculus; identical to SEQ ID NO: 4145
  misc_feature (41)..(107): n is a, c, g, or t
  misc_feature (118)..(134): n is a, c, g, or t
  misc_feature (325)..(339): n is a, c, g, or t

SEQ ID NO: 4147 - DNA, 334 bp, Mus musculus
  misc_feature (139)..(141): n is a, c, g, or t
  misc_feature (143)..(146): n is a, c, g, or t
  misc_feature (148)..(148): n is a, c, g, or t
  misc_feature (223)..(237): n is a, c, g, or t
  misc_feature (271)..(307): n is a, c, g, or t
gggctcacctcctagggcattctaggtgaggagctgaactcagggcattgtcaatcatggcacaggggaaaagaatgccaactagtgttttattcagtccaagtgtggcctgggagaccccactggcctcaggttcccnnngnnnnangggctagtaccaggctctgccccaatcacagggactactgaaagggatatgagggtgaagagaggccggatgagnnnnnnnnnnnnnnnaggggatagggtcttagcctgagttgctgacccnnnnnnnnnnnnnnnnnnnnnnnnnnnnnnnnnnnnntcttacgtgggtatctctgcgcagtgt

SEQ ID NO: 4148 - DNA, 334 bp, Mus musculus; identical to SEQ ID NO: 4147
  misc_feature (139)..(141): n is a, c, g, or t
  misc_feature (143)..(146): n is a, c, g, or t
  misc_feature (148)..(148): n is a, c, g, or t
  misc_feature (223)..(237): n is a, c, g, or t
  misc_feature (271)..(307): n is a, c, g, or t

SEQ ID NO: 4149 - DNA, 623 bp, Mus musculus
  misc_feature (325)..(573): n is a, c, g, or t
tgtccttgctaccatggtagagtagatgagcgaggcataggtggagcagctgttgtctgggcaggaggatgtcaatggtagcatcaactatgaagcctttgtcaagcacatcatgtctgggtaaagcacgtctctccagggtgagttctacttcttcctcaaggtccttctggggctcatgggcagacagtaccatgtggcctggaagtcttgtgcatgggatgtggggctaagataggagggcagcctggggcttgggtggggggtgggggctccagccctctctccttaactctataacctcttgccccctgtcttctgcctnnnnnnnnnnnnnnnnnnnnnnnnnnnnnnnnnnnnnnnnnnnnnnnnnnnnnnnnnnnnnnnnnnnnnnnnnnnnnnnnnnnnnnnnnnnnnnnnnnnnnnnnnnnnnnnnnnnnnnnnnnnnnnnnnnnnnnnnnnnnnnnnnnnnnnnnnnnnnnnnnnnnnnnnnnnnnnnnnnnnnnnnnnnnnnnnnnnnnnnnnnnnnnnnnnnnnnnnnnnnnnnnnnnnnnnnnnnnnnnnnnnnnnnnnggtgaatcacatggcttctctgacccacaaccttccctggaaataaagag

SEQ ID NO: 4150 - DNA, 623 bp, Mus musculus; identical to SEQ ID NO: 4149
  misc_feature (325)..(573): n is a, c, g, or t

SEQ ID NO: 4151 - DNA, 542 bp, Mus musculus
  misc_feature (26)..(26): n is a, c, g, or t
  misc_feature (30)..(30): n is a, c, g, or t
  misc_feature (39)..(41): n is a, c, g, or t
  misc_feature (43)..(46): n is a, c, g, or t
  misc_feature (141)..(141): n is a, c, g, or t
  misc_feature (217)..(231): n is a, c, g, or t
  misc_feature (341)..(341): n is a, c, g, or t
  misc_feature (347)..(347): n is a, c, g, or t
  misc_feature (349)..(349): n is a, c, g, or t
  misc_feature (363)..(363): n is a, c, g, or t
  misc_feature (403)..(403): n is a, c, g, or t
  misc_feature (479)..(479): n is a, c, g, or t
  misc_feature (514)..(514): n is a, c, g, or t
tgcctttcagctgacaggcaggatgntggncacattgtnnncnnnnattgttccttctcaggacccggggaaaggggcgcttgaaagatttaggacaaagtaagtggaaacctctagccagtcttagagaggggaaagaancatcagcttatataatgtatgtaaatttgctaagccaccccatgtacctaccacattattgcctttactgttctcnnnnnnnnnnnnnnntgtatttagaaagtactttgagccaattctataatttaattggtcctcttttggggtacatattggtgcccactgtgcatgacttgccgatcttggctatgcttttgatnataacnantccaggctgcggtnctgtggtctgtaagagtcaagctgctgagctggtgggctncctttgaccctgaaataggacccgcgtgctagacgtgcatcttggctgaatgaagggtttattggtttttagtgtntttttgttcttaaaaaaatactgttatttgatttnttgtaaatgctgtgaatctctatttgtc

SEQ ID NO: 4152 - DNA, 542 bp, Mus musculus; identical to SEQ ID NO: 4151
  misc_feature (26)..(26): n is a, c, g, or t
  misc_feature (30)..(30): n is a, c, g, or t
  misc_feature (39)..(41): n is a, c, g, or t
  misc_feature (43)..(46): n is a, c, g, or t
  misc_feature (141)..(141): n is a, c, g, or t
  misc_feature (217)..(231): n is a, c, g, or t
  misc_feature (341)..(341): n is a, c, g, or t
  misc_feature (347)..(347): n is a, c, g, or t
  misc_feature (349)..(349): n is a, c, g, or t
  misc_feature (363)..(363): n is a, c, g, or t
  misc_feature (403)..(403): n is a, c, g, or t
  misc_feature (479)..(479): n is a, c, g, or t
  misc_feature (514)..(514): n is a, c, g, or t

SEQ ID NO: 4153 - DNA, 346 bp, Mus musculus
  misc_feature (138)..(163): n is a, c, g, or t
  misc_feature (166)..(166): n is a, c, g, or t
  misc_feature (168)..(168): n is a, c, g, or t
  misc_feature (175)..(175): n is a, c, g, or t
  misc_feature (177)..(177): n is a, c, g, or t
  misc_feature (180)..(180): n is a, c, g, or t
  misc_feature (184)..(184): n is a, c, g, or t
  misc_feature (186)..(186): n is a, c, g, or t
  misc_feature (192)..(192): n is a, c, g, or t
  misc_feature (199)..(199): n is a, c, g, or t
  misc_feature (218)..(218): n is a, c, g, or t
  misc_feature (221)..(221): n is a, c, g, or t
  misc_feature (253)..(253): n is a, c, g, or t
  misc_feature (309)..(309): n is a, c, g, or t
cagcatctgtagcaggtgggttagtaaccctcacatagaggggtatactccttgggatggtttgggccaataggggctatattgagtagtttgtgacttttttctgcttttgattctgggatatgtttaaacattctnnnnnnnnnnnnnnnnnnnnnnnnnntantntttttantntcntccnangggcanttttttntatttatatcaccaagtanccnaatgagttatttaagttgtcagtacaaatatntcaactttttaaaaaatggattactataaaataaccaaacttcatgagaaattttntcttaccagaggcatttcagctttggaaccaaatctg

SEQ ID NO: 4154 - DNA, 346 bp, Mus musculus; identical to SEQ ID NO: 4153
  misc_feature (138)..(163): n is a, c, g, or t
  misc_feature (166)..(166): n is a, c, g, or t
  misc_feature (168)..(168): n is a, c, g, or t
  misc_feature (175)..(175): n is a, c, g, or t
  misc_feature (177)..(177): n is a, c, g, or t
  misc_feature (180)..(180): n is a, c, g, or t
  misc_feature (184)..(184): n is a, c, g, or t
  misc_feature (186)..(186): n is a, c, g, or t
  misc_feature (192)..(192): n is a, c, g, or t
  misc_feature (199)..(199): n is a, c, g, or t
  misc_feature (218)..(218): n is a, c, g, or t
  misc_feature (221)..(221): n is a, c, g, or t
  misc_feature (253)..(253): n is a, c, g, or t
  misc_feature (309)..(309): n is a, c, g, or t

SEQ ID NO: 4155 - DNA, 379 bp, Mus musculus
  misc_feature (109)..(128): n is a, c, g, or t
  misc_feature (134)..(134): n is a, c, g, or t
  misc_feature (199)..(199): n is a, c, g, or t
  misc_feature (210)..(210): n is a, c, g, or t
ggtgaatttgcaccaaggcagcagcatagtcgccgcagttccatcttcgtctccgcgatgttgcccttagccaaaaacgcactaagccgtctccaagttcgaagcattnnnnnnnnnnnnnnnnnnnnagagcnaccagaagagggcacctagtttccatgacaaatatgggaatgctatattagcaggtggagccatnttctgtgtttntacatggacatatacagccacacaaattggaatagaatggaacatgtcccctgttggcagagtcaccccaaaggaatggagagatcagtagtcgtgccagctggtacaataatcaaggaattgtttaaaaccaacttataagtgaatgccaagtcaaagaatcatgtac

SEQ ID NO: 4156 - DNA, 379 bp, Mus musculus; identical to SEQ ID NO: 4155
  misc_feature (109)..(128): n is a, c, g, or t
  misc_feature (134)..(134): n is a, c, g, or t
  misc_feature (199)..(199): n is a, c, g, or t
  misc_feature (210)..(210): n is a, c, g, or t

SEQ ID NO: 4157 - DNA, 212 bp, Mus musculus
cttgtctgtcggtgacatgattggggtgggtgggggttgtcattgccaattgagctgctgattcttatgaatcacattcagaactcgcatagggttgacactgtaaggggtggggaaatctagctatttttttttccccagcccattcttgggggtcggggggaggcaggagaatgccccttcctcctaagcccttcctgtgtgttgagctt

SEQ ID NO: 4158 - DNA, 212 bp, Mus musculus; identical to SEQ ID NO: 4157

SEQ ID NO: 4159 - DNA, 255 bp, Mus musculus
  misc_feature (116)..(180): n is a, c, g, or t
atcgtttttgctatttgtacacagtacagtaagcacaattggaattgtacatctagaagtattactgtagaatctctgagcagaatatgtgtaaccaaaataagaaagaatataannnnnnnnnnnnnnnnnnnnnnnnnnnnnnnnnnnnnnnnnnnnnnnnnnnnnnnnnnnnnnnnntctcagtgaaaatgttggctaggcaagttcagttaaaatatagtagaaatgtttatcctggtttctctaagtata

SEQ ID NO: 4160 - DNA, 255 bp, Mus musculus; identical to SEQ ID NO: 4159
  misc_feature (116)..(180): n is a, c, g, or t

SEQ ID NO: 4161 - DNA, 318 bp, Mus musculus
  misc_feature (38)..(52): n is a, c, g, or t
catgtccctgggtacaacagagtgcatcctcctgactnnnnnnnnnnnnnnncgctatgtggctgtgtgccaacccctgcactatgccaccaaaatcaacccccacctatgtcgccagttggcaggtatagcttgggctataggtttggtccaatccatagttcagacacctcccaccctcaaactgccattttgttcccacaggcagatagacaactttctgtgtgaagtcccatctctaattcaactctcttgtggggacaccacctataatgagatccagatggctgttgctagtatcttcattgtggttgttcc

SEQ ID NO: 4162 - DNA, 118 bp, Mus musculus
ttcagttgtcagttgcaggtgtcatcttcctgcttgtacctctgagcctcatcattgtctcttatggtgtcattgccagggctgtactaaaaactaactcttcaaaagggcgcagaaa

SEQ ID NO: 4163 - DNA, 524 bp, Mus musculus
  misc_feature (64)..(83): n is a, c, g, or t
tgtgctcatcgctggcgctgggctccgccgagtgcgtgctgctggccgtcatggcgctggaccnnnnnnnnnnnnnnnnnnnncctctgcgctacacctcactggcctcgccgctactgtgccgcacgctggccggagtctcctggctcggtggcctggccaactccgcggcgcagaccgccctgctggccgcgcgtcccctgtgcgcaccccgctgtctggaccatttcatctgcgagttgccggcgctgctgcagctggcctgccgcggcggccgcagcgccaccgagcgccagatgttcgccgcgcgtgtggtcatcctgttggtgccttcggcggtcatcctggcctcctacatcgccgtgggccgcgcggtctggggcatgcactccagctctggctggcggaaagcggcgagcacatgtggctctcacttgaccgcggtctgcctattttatggctctgccacctacacctacctgcaacccacgcatagttacaaccagggccgtggcaaattcgtc

SEQ ID NO: 4164 - DNA, 251 bp, Mus musculus
  misc_feature (90)..(104): n is a, c, g, or t
  misc_feature (181)..(181): n is a, c, g, or t
  misc_feature (211)..(211): n is a, c, g, or t
gttttttgactacagaatctatccgatacccagcctacttgtgtataaagatataaatagaacgacagaactaagtttgctaaggacatnnnnnnnnnnnnnnnctatttagctcttgaactgccattgcggtcctcgcgctgagcaagttagcaccaccctcctttgacctcgcggcctntgaccaaactccacacacgggcggcgcgtngatgagacctgcctggactcgtttgcgttttccattctgg

SEQ ID NO: 4165 - DNA, 251 bp, Mus musculus; identical to SEQ ID NO: 4164
  misc_feature (90)..(104): n is a, c, g, or t
  misc_feature (181)..(181): n is a, c, g, or t
  misc_feature (211)..(211): n is a, c, g, or t

SEQ ID NO: 4166 - DNA, 307 bp, Mus musculus
  misc_feature (36)..(37): n is a, c, g, or t
  misc_feature (44)..(44): n is a, c, g, or t
  misc_feature (79)..(79): n is a, c, g, or t
  misc_feature (120)..(120): n is a, c, g, or t
  misc_feature (147)..(147): n is a, c, g, or t
  misc_feature (149)..(149): n is a, c, g, or t
  misc_feature (167)..(168): n is a, c, g, or t
  misc_feature (176)..(176): n is a, c, g, or t
  misc_feature (214)..(214): n is a, c, g, or t
  misc_feature (218)..(224): n is a, c, g, or t
  misc_feature (228)..(233): n is a, c, g, or t
  misc_feature (235)..(235): n is a, c, g, or t
  misc_feature (271)..(271): n is a, c, g, or t
atggccaatcctttttaggaagaatttaatttgcgnntttctgngcttttgcttttccaagaaactaatttctgctagnccaattctttggccaatagcccccagctttctcagaaatgntcatagcaacctcctgaatctccctgngnccattgtgttttgtggtnngtgtgtgngtgtgtgtgtgtgtgtgtgtgtgtaggggggaaagcantggnnnnnnntttnnnnnncntttgaccctctgcagaagttggagggcgcctctccngctaaacctgtcagttcttggtgagtgactgaaact

SEQ ID NO: 4167 - DNA, 307 bp, Mus musculus; identical to SEQ ID NO: 4166
  misc_feature (36)..(37): n is a, c, g, or t
  misc_feature (44)..(44): n is a, c, g, or t
  misc_feature (79)..(79): n is a, c, g, or t
  misc_feature (120)..(120): n is a, c, g, or t
  misc_feature (147)..(147): n is a, c, g, or t
  misc_feature (149)..(149): n is a, c, g, or t
  misc_feature (167)..(168): n is a, c, g, or t
  misc_feature (176)..(176): n is a, c, g, or t
  misc_feature (214)..(214): n is a, c, g, or t
  misc_feature (218)..(224): n is a, c, g, or t
  misc_feature (228)..(233): n is a, c, g, or t
  misc_feature (235)..(235): n is a, c, g, or t
  misc_feature (271)..(271): n is a, c, g, or t

SEQ ID NO: 4168 - DNA, 264 bp, Mus musculus
  misc_feature (35)..(35): n is a, c, g, or t
  misc_feature (76)..(76): n is a, c, g, or t
  misc_feature (103)..(103): n is a, c, g, or t
  misc_feature (105)..(105): n is a, c, g, or t
  misc_feature (123)..(124): n is a, c, g, or t
  misc_feature (132)..(132): n is a, c, g, or t
  misc_feature (170)..(170): n is a, c, g, or t
  misc_feature (174)..(180): n is a, c, g, or t
  misc_feature (184)..(189): n is a, c, g, or t
  misc_feature (191)..(191): n is a, c, g, or t
  misc_feature (227)..(227): n is a, c, g, or t
gcttttgcttttccaagaaactaatttctgctagnccaattctttggccaatagcccccagctttctcagaaatgntcatagcaacctcctgaatctccctgngnccattgtgttttgtggtnngtgtgtgngtgtgtgtgtgtgtgtgtgtgtgtaggggggaaagcantggnnnnnnntttnnnnnncntttgaccctctgcagaagttggagggcgcctctccngctaaacctgtcagttcttggtgagtgactgaaactt

SEQ ID NO: 4169 - DNA, 264 bp, Mus musculus; identical to SEQ ID NO: 4168
  misc_feature (35)..(35): n is a, c, g, or t
  misc_feature (76)..(76): n is a, c, g, or t
  misc_feature (103)..(103): n is a, c, g, or t
  misc_feature (105)..(105): n is a, c, g, or t
  misc_feature (123)..(124): n is a, c, g, or t
  misc_feature (132)..(132): n is a, c, g, or t
  misc_feature (170)..(170): n is a, c, g, or t
  misc_feature (174)..(180): n is a, c, g, or t
  misc_feature (184)..(189): n is a, c, g, or t
  misc_feature (191)..(191): n is a, c, g, or t
  misc_feature (227)..(227): n is a, c, g, or t

SEQ ID NO: 4170 - DNA, 364 bp, Mus musculus
  misc_feature (31)..(31): n is a, c, g, or t
  misc_feature (38)..(54): n is a, c, g, or t
  misc_feature (148)..(178): n is a, c, g, or t
  misc_feature (181)..(182): n is a, c, g, or t
ttgcatggccgcacgctgggagcctgtggcntcccagnnnnnnnnnnnnnnnnntgtggggctgttccacatgccgccccgtcacggcggtgaggccattccacatcgtttttaaactaatgttttctatattaacattattctggcnnnnnnnnnnnnnnnnnnnnnnnnnnnnnnngcnngtgggacatcccatgctccaatcaaagggatttttagcagtgcctctgatcaagcactgccaagtcagctccacatccgtttccccccttccccttttttgtcagtattatttgggaaggagacatgccaggacaatgtcattgtgctacatgcagaaaatcatgtttcctgttggcacaaa

SEQ ID NO: 4171 - DNA, 364 bp, Mus musculus; identical to SEQ ID NO: 4170
  misc_feature (31)..(31): n is a, c, g, or t
  misc_feature (38)..(54): n is a, c, g, or t
  misc_feature (148)..(178): n is a, c, g, or t
  misc_feature (181)..(182): n is a, c, g, or t

SEQ ID NO: 4172 - DNA, 578 bp, Mus musculus
  misc_feature (146)..(146): n is a, c, g, or t
  misc_feature (204)..(204): n is a, c, g, or t
  misc_feature (466)..(499): n is a, c, g, or t
ccctcatgttgattcttaaatgtagtgttctacttgtgacagacagattggtagacagccatttttttgtgtcttaaaataattgggggcatagttaaaattttatacaagtgattgctgttactgaatgttgcaggtgagatggnttatttttagcttatttgagatatctgaagaggtgggagggggggagacatatttganatttgaaaaccctaaaccttttggaaagaaattgtaattttcacttacatttctttaagactttaagagatttataattgatgtagttaagtcaaaccataaccattggtgattatgaagcaaaaattagagcctgcagaaaaagttataatggaaggattaaaaaaaatctaaagattttgttttaattgcatcaatttctgtatttgtgtgaatttataaacatgcagtaagttttgaatgaggtaaatcttgtctaatnnnnnnnnnnnnnnnnnnnnnnnnnnnnnnnnnnccccagctaaaaaaagtgcagtacttggaaattgttctttatggttgtagtgttgctgaagcactaacatgcagaaaat

SEQ ID NO: 4173 - DNA, 578 bp, Mus musculus; identical to SEQ ID NO: 4172
  misc_feature (146)..(146): n is a, c, g, or t
  misc_feature (204)..(204): n is a, c, g, or t
  misc_feature (466)..(499): n is a, c, g, or t

SEQ ID NO: 4174 - DNA, 430 bp, Mus musculus
  misc_feature (51)..(51): n is a, c, g, or t
  misc_feature (83)..(83): n is a, c, g, or t
  misc_feature (96)..(110): n is a, c, g, or t
  misc_feature (116)..(117): n is a, c, g, or t
  misc_feature (162)..(162): n is a, c, g, or t
tttgttgttgttgagagcctgtcctttccatactagaccactaacaaacanttttgctgtaggtgacagtagccacctctccngtaaacattgtcnnnnnnnnnnnnnnntaaacnnatttacccttagttgaaacttggggtttaaccaccttttgaatanggtgtggtgggtagggtgaaatttgcttgtaagggtttacatttgtgattgatagtttgaaaggaagtaacattaagcttgaacatcgagcatctttgtccttgtccagatattatgaggaactttgtcgaaagatatgaagggtgtgtttcttcaagttctgtgcatttaatgtagctgttaaaacagtacagctgtctttgggtgatgtggtaggttttggctttgggaaccttgaggttcttttgttatagttactcacctagga

SEQ ID NO: 4175 - DNA, 430 bp, Mus musculus; identical to SEQ ID NO: 4174
  misc_feature (51)..(51): n is a, c, g, or t
  misc_feature (83)..(83): n is a, c, g, or t
  misc_feature (96)..(110): n is a, c, g, or t
  misc_feature (116)..(117): n is a, c, g, or t
  misc_feature (162)..(162): n is a, c, g, or t

SEQ ID NO: 4176 - DNA, 302 bp, Mus musculus
  misc_feature (230)..(244): n is a, c, g, or t
catctcaattctggagttgaatatgataaattccaagatctgtctatgagccatgcttttgtaggggtggtgctattttcagcattctgaggtcaaggtcaacttttggtgtttgcctttttgctttgtatatgaaatttgtagtgaaattacaaatgaaataaattatatgtatttaaatagtattaaaaggagagaaagtattagactgagttctgttataacaacannnnnnnnnnnnnnntttccatcataatttgatgatagattgataacccacaatactggaataccacagattg

SEQ ID NO: 4177 - DNA, 302 bp, Mus musculus; identical to SEQ ID NO: 4176
  misc_feature (230)..(244): n is a, c, g, or t

SEQ ID NO: 4178 - DNA, 397 bp, Mus musculus
  misc_feature (26)..(26): n is a, c, g, or t
  misc_feature (48)..(48): n is a, c, g, or t
caagcctcgaactgttgacaagaccngggagaatccacccatgggcgncccaccaggttcttatggatgcaagcaggagaagctcaacaccctgcctcttgccaagacaaggaagcctcacctggctttgacctgccatccgttgctgaggccactggcttccatcctaagaatgaggtgcaacaagaccccattctcacagaacctcaaagacttggttccaggctctccagagaccatacccaactcatgtgcatgtgccgtttttgcttcaagctcagtagcaggacctgccccgagccccctgctccttgcccctctgtgaggagttacggagagggctttgtctctagagcagaagagaatgatgggacggcctgatgctgtcatgctctcc

SEQ ID NO: 4179 - DNA, 397 bp, Mus musculus; identical to SEQ ID NO: 4178
  misc_feature (26)..(26): n is a, c, g, or t
  misc_feature (48)..(48): n is a, c, g, or t

SEQ ID NO: 4180 - DNA, 74 bp, Mus musculus
gccaccgatgactcaatgtgtcttgctgaatcaggcctctcttatccctgccatcgattaactgtgggaagaag

SEQ ID NO: 4181 - DNA, 74 bp, Mus musculus; identical to SEQ ID NO: 4180

SEQ ID NO: 4182 - DNA, 378 bp, Mus musculus
  misc_feature (30)..(30): n is a, c, g, or t
  misc_feature (138)..(138): n is a, c, g, or t
  misc_feature (151)..(151): n is a, c, g, or t
  misc_feature (154)..(154): n is a, c, g, or t
  misc_feature (158)..(158): n is a, c, g, or t
  misc_feature (163)..(163): n is a, c, g, or t
  misc_feature (166)..(167): n is a, c, g, or t
  misc_feature (171)..(171): n is a, c, g, or t
  misc_feature (178)..(178): n is a, c, g, or t
  misc_feature (185)..(185): n is a, c, g, or t
  misc_feature (188)..(188): n is a, c, g, or t
  misc_feature (190)..(190): n is a, c, g, or t
  misc_feature (194)..(195): n is a, c, g, or t
  misc_feature (199)..(210): n is a, c, g, or t
  misc_feature (235)..(249): n is a, c, g, or t
gtcaggtccgtaagcctcagcctgctccancctctgcctcataggtctcttctcgccagtactggatgctgcctcccatggcagtcagtaggcagggttccgtgggatggtaagccagtgactgtaccacattagaanccacaggcagggncantgcnaaggnacnntctnccaggtnccagaanaanantttnncatnnnnnnnnnnnntgaccacatgtgtgtcgcgctcacnnnnnnnnnnnnnnngcttgtactgctggttcttatggccaacatactcgcccagcagctcccctgtgtctttatctagaagccgcagagtagagtccaggctggatatcagagtgcactgccgtcccggctgaagcaggtgca

SEQ ID NO: 4183 - DNA, 378 bp, Mus musculus; identical to SEQ ID NO: 4182
  misc_feature (30)..(30): n is a, c, g, or t
  misc_feature (138)..(138): n is a, c, g, or t
  misc_feature (151)..(151): n is a, c, g, or t
  misc_feature (154)..(154): n is a, c, g, or t
  misc_feature (158)..(158): n is a, c, g, or t
  misc_feature (163)..(163): n is a, c, g, or t
  misc_feature (166)..(167): n is a, c, g, or t
  misc_feature (171)..(171): n is a, c, g, or t
  misc_feature (178)..(178): n is a, c, g, or t
  misc_feature (185)..(185): n is a, c, g, or t
  misc_feature (188)..(188): n is a, c, g, or t
  misc_feature (190)..(190): n is a, c, g, or t
  misc_feature (194)..(195): n is a, c, g, or t
  misc_feature (199)..(210): n is a, c, g, or t
  misc_feature (235)..(249): n is a, c, g, or t

SEQ ID NO: 4184 - DNA, 198 bp, Mus musculus
  misc_feature (157)..(171): n is a, c, g, or t
ggaagccattctacccagctcttatcagctacatgagctctgggcctgtggtggccatggtctgggaaggccccaatgtggtccatatctcaagggccatgataggacacaccgactcaacagaggcagcccccgggacaatcaggggcgacttcannnnnnnnnnnnnnnggaacgtcatccatgctagcgattctg

SEQ ID NO: 4185 - DNA, 198 bp, Mus musculus; identical to SEQ ID NO: 4184
  misc_feature (157)..(171): n is a, c, g, or t

SEQ ID NO: 4186 - DNA, 488 bp, Mus musculus
  misc_feature (46)..(46): n is a, c, g, or t
  misc_feature (276)..(276): n is a, c, g, or t
  misc_feature (283)..(283): n is a, c, g, or t
  misc_feature (285)..(286): n is a, c, g, or t
  misc_feature (293)..(293): n is a, c, g, or t
  misc_feature (295)..(295): n is a, c, g, or t
  misc_feature (299)..(299): n is a, c, g, or t
  misc_feature (303)..(303): n is a, c, g, or t
  misc_feature (311)..(311): n is a, c, g, or t
  misc_feature (319)..(319): n is a, c, g, or t
  misc_feature (324)..(324): n is a, c, g, or t
  misc_feature (360)..(360): n is a, c, g, or t
  misc_feature (362)..(362): n is a, c, g, or t
  misc_feature (376)..(376): n is a, c, g, or t
  misc_feature (381)..(381): n is a, c, g, or t
  misc_feature (384)..(384): n is a, c, g, or t
  misc_feature (387)..(423): n is a, c, g, or t
agcctggcctcagacaaaggggtcggcgaggccggagccgcgcggncctcgagtccccgcagaggaagcacaagtgccactacgcgggctgcgagaaagtttacgggaaatcttcgcacctcaaggcgcacctgagaactcacacaggtgagaggcctttcgcctgcagctggcaggagtgcaacaagaagttcgcacgctcggacgagctggcacggcactatcgcacgcacacgggcgagaagaagttcagctgccccatctgtgagaagcgcntcatgcngnncgaccancntgangaancacgcacnccgccacnccaanttccacccaggcatgctgcagcggcgcggcgggggntngaggaccggctcgntcagngantannnnnnnnnnnnnnnnnnnnnnnnnnnnnnnnnnnnngccagctcaccctgagcacccgcgcctggaccgcgcctcctcacccctttggtaataggaaagct

SEQ ID NO: 4187 - DNA, 488 bp, Mus musculus; identical to SEQ ID NO: 4186
  misc_feature (46)..(46): n is a, c, g, or t
  misc_feature (276)..(276): n is a, c, g, or t
  misc_feature (283)..(283): n is a, c, g, or t
  misc_feature (285)..(286): n is a, c, g, or t
  misc_feature (293)..(293): n is a, c, g, or t
  misc_feature (295)..(295): n is a, c, g, or t
  misc_feature (299)..(299): n is a, c, g, or t
  misc_feature (303)..(303): n is a, c, g, or t
  misc_feature (311)..(311): n is a, c, g, or t
  misc_feature (319)..(319): n is a, c, g, or t
  misc_feature (324)..(324): n is a, c, g, or t
  misc_feature (360)..(360): n is a, c, g, or t
  misc_feature (362)..(362): n is a, c, g, or t
  misc_feature (376)..(376): n is a, c, g, or t
  misc_feature (381)..(381): n is a, c, g, or t
  misc_feature (384)..(384): n is a, c, g, or t
  misc_feature (387)..(423): n is a, c, g, or t

SEQ ID NO: 4188 - DNA, 232 bp, Mus musculus
ggaactgcatgctgccaagtgccattcgtactgagcatcctcatttcaacgcagtatacgctctagttatcatgtgtaacgtgggtctgtttagctgagatagactagaggaggacactagagatgcccattcctactccctccctttggtcactagccaccattatggttccactggctgtttgtatatagggttatgtattaactctagaatcccgtgtgcccttcttgc

SEQ ID NO: 4189 - DNA, 232 bp, Mus musculus; identical to SEQ ID NO: 4188

SEQ ID NO: 4190 - DNA, 440 bp, Mus musculus
  misc_feature (27)..(27): n is a, c, g, or t
  misc_feature (53)..(53): n is a, c, g, or t
  misc_feature (127)..(127): n is a, c, g, or t
  misc_feature (264)..(270): n is a, c, g, or t
  misc_feature (272)..(272): n is a, c, g, or t
  misc_feature (277)..(277): n is a, c, g, or t
  misc_feature (283)..(283): n is a, c, g, or t
  misc_feature (286)..(286): n is a, c, g, or t
  misc_feature (288)..(288): n is a, c, g, or t
  misc_feature (290)..(290): n is a, c, g, or t
  misc_feature (305)..(305): n is a, c, g, or t
  misc_feature (340)..(340): n is a, c, g, or t
  misc_feature (363)..(363): n is a, c, g, or t
  misc_feature (392)..(392): n is a, c, g, or t
ggcacagagcaactgagcctacccgcngactttgggccgatgtggacctcacngaatttgaccagtatctcaattgcagccggactcgacggaatgccactacactccccttacacgttggcactgnccaaactaggtcccgcgcgcattgtcctgtcaggaagagagcagcctcatttctgcgctgtctgatgctagcagcgcggtctattacagtgcttgcatctcaggctagacactgtccttgccctccaccgcttctgnnnnnnncnaagtngcaganttncntnctcccttcctttcgnatatgtatgttagggtatgcaacagcctttagagntggtggcctaaagatgccatttntgtcgcctcctcatttacacacctccttntgggggttcctgtgctttgggccttccctaggaacctcaggccctgga

SEQ ID NO: 4191 - DNA, 440 bp, Mus musculus; identical to SEQ ID NO: 4190
  misc_feature (27)..(27): n is a, c, g, or t
  misc_feature (53)..(53): n is a, c, g, or t
  misc_feature (127)..(127): n is a, c, g, or t
  misc_feature (264)..(270): n is a, c, g, or t
  misc_feature (272)..(272): n is a, c, g, or t
  misc_feature (277)..(277): n is a, c, g, or t
  misc_feature (283)..(283): n is a, c, g, or t
  misc_feature (286)..(286): n is a, c, g, or t
  misc_feature (288)..(288): n is a, c, g, or t
  misc_feature (290)..(290): n is a, c, g, or t
  misc_feature (305)..(305): n is a, c, g, or t
  misc_feature (340)..(340): n is a, c, g, or t
  misc_feature (363)..(363): n is a, c, g, or t
  misc_feature (392)..(392): n is a, c, g, or t

SEQ ID NO: 4192 - DNA, 488 bp, Mus musculus
  misc_feature (74)..(75): n is a, c, g, or t
  misc_feature (77)..(79): n is a, c, g, or t
  misc_feature (83)..(86): n is a, c, g, or t
  misc_feature (88)..(91): n is a, c, g, or t
  misc_feature (93)..(103): n is a, c, g, or t
  misc_feature (106)..(108): n is a, c, g, or t
  misc_feature (110)..(112): n is a, c, g, or t
  misc_feature (114)..(115): n is a, c, g, or t
  misc_feature (118)..(119): n is a, c, g, or t
  misc_feature (141)..(141): n is a, c, g, or t
  misc_feature (166)..(166): n is a, c, g, or t
  misc_feature (171)..(171): n is a, c, g, or t
  misc_feature (349)..(349): n is a, c, g, or t
  misc_feature (369)..(369): n is a, c, g, or t
  misc_feature (381)..(381): n is a, c, g, or t
  misc_feature (406)..(448): n is a, c, g, or t
  misc_feature (461)..(461): n is a, c, g, or t
  misc_feature (463)..(463): n is a, c, g, or t
agacacggaaggtctgcgaggaccaggcaggcaaggcagcctctccctgaggcccctcggagggcaacggaggnnannnggannnnannnngnnnnnnnnnnnccnnncnnncnnggnngcctctgccctagagcggggcnacgcccacacgctgggagcatggcnacagnctggccacctcccactcctcgagcccaccctcctaccctgagcatgccactcgtggccaagctcccttgttatttgctctgtagttccctctgcctgggatgcccttccccctctctatgcctggcagttatcttgtccctttgaggccccacatcaagtgtcacctccttccccagntctcccgggcagaaatagtngtctgtgcttanttggttcatgcttcttgtgtgacannnnnnnnnnnnnnnnnnnnnnnnnnnnnnnnnnnnnnnnnnnaagctagactgtntntgaatcatgtctgtagcccagtgcc

SEQ ID NO: 4193 - DNA, 488 bp, Mus musculus; identical to SEQ ID NO: 4192
  misc_feature (74)..(75): n is a, c, g, or t
  misc_feature (77)..(79): n is a, c, g, or t
  misc_feature (83)..(86): n is a, c, g, or t
  misc_feature (88)..(91): n is a, c, g, or t
  misc_feature (93)..(103): n is a, c, g, or t
  misc_feature (106)..(108): n is a, c, g, or t
  misc_feature (110)..(112): n is a, c, g, or t
  misc_feature (114)..(115): n is a, c, g, or t
  misc_feature (118)..(119): n is a, c, g, or t
  misc_feature (141)..(141): n is a, c, g, or t
  misc_feature (166)..(166): n is a, c, g, or t
  misc_feature (171)..(171): n is a, c, g, or t
  misc_feature (349)..(349): n is a, c, g, or t
  misc_feature (369)..(369): n is a, c, g, or t
  misc_feature (381)..(381): n is a, c, g, or t
  misc_feature (406)..(448): n is a, c, g, or t
  misc_feature (461)..(461): n is a, c, g, or t
  misc_feature (463)..(463): n is a, c, g, or t

SEQ ID NO: 4194 - DNA, 363 bp, Mus musculus
gtccgcacctgtgttgtccgttcagaccaatggcggttaatgacctttgagaccactgagaatgacaaagtgaagaagataaatgaacatattaggtcccaaaccaaggtctctgtacaggaccagatccttctgctagactccaaaatcctcaagccccatcgaaaattgtcatcctatgggattgacaaggaaaccactatccaccttaccctgaaggtggtgaagcccagtgatgaagagctgcccttgtttctggtggagtccaaaaacgaggggcaaaggcacctcctccgagttcgaagatccagctcagtggcccaggtgaaagagatgatcgagagtgtgacctctgtgatccct

SEQ ID NO: 4195 - DNA, 380 bp, Mus musculus
  misc_feature (27)..(27): n is a, c, g, or t
  misc_feature (35)..(37): n is a, c, g, or t
  misc_feature (39)..(39): n is a, c, g, or t
  misc_feature (52)..(52): n is a, c, g, or t
  misc_feature (80)..(80): n is a, c, g, or t
  misc_feature (82)..(82): n is a, c, g, or t
  misc_feature (86)..(86): n is a, c, g, or t
  misc_feature (116)..(132): n is a, c, g, or t
  misc_feature (137)..(137): n is a, c, g, or t
  misc_feature (139)..(140): n is a, c, g, or t
  misc_feature (146)..(146): n is a, c, g, or t
  misc_feature (148)..(148): n is a, c, g, or t
  misc_feature (152)..(153): n is a, c, g, or t
  misc_feature (187)..(187): n is a, c, g, or t
  misc_feature (196)..(196): n is a, c, g, or t
  misc_feature (309)..(323): n is a, c, g, or t
  misc_feature (355)..(355): n is a, c, g, or t
gcacgaggacggaatccagctggagangggggggnnngnctccccacagcanagtcctgcggcaccccttcccttctagncnttcncccaggtgcaccatctcacaccctccaacnnnnnnnnnnnnnnnnncttgncnnagttcncnggtnntagaattctggacgctgtctcccttggctgtgcntagggcacntccccccactccccgccaaaccttctattattactagggctgtggaaaatgactttattttctcgggacccacccttcttcttcacactgcccccatgcctcagtctcatgcnnnnnnnnnnnnnnngggggcatgggtggagcagaagggggttcccntaccctgaatagccaaaggcagtgg

SEQ ID NO: 4196 - DNA, 380 bp, Mus musculus; identical to SEQ ID NO: 4195
  misc_feature (27)..(27): n is a, c, g, or t
  misc_feature (35)..(37): n is a, c, g, or t
  misc_feature (39)..(39): n is a, c, g, or t
  misc_feature (52)..(52): n is a, c, g, or t
  misc_feature (80)..(80): n is a, c, g, or t
  misc_feature (82)..(82): n is a, c, g, or t
  misc_feature (86)..(86): n is a, c, g, or t
  misc_feature (116)..(132): n is a, c, g, or t
  misc_feature (137)..(137): n is a, c, g, or t
  misc_feature (139)..(140): n is a, c, g, or t
  misc_feature (146)..(146): n is a, c, g, or t
  misc_feature (148)..(148): n is a, c, g, or t
  misc_feature (152)..(153): n is a, c, g, or t
  misc_feature (187)..(187): n is a, c, g, or t
  misc_feature (196)..(196): n is a, c, g, or t
  misc_feature (309)..(323): n is a, c, g, or t
  misc_feature (355)..(355): n is a, c, g, or t

SEQ ID NO: 4197 - DNA, 595 bp, Mus musculus
  misc_feature (33)..(57): n is a, c, g, or t
  misc_feature (136)..(136): n is a, c, g, or t
  misc_feature (151)..(151): n is a, c, g, or t
  misc_feature (187)..(187): n is a, c, g, or t
  misc_feature (269)..(269): n is a, c, g, or t
  misc_feature (271)..(272): n is a, c, g, or t
  misc_feature (275)..(278): n is a, c, g, or t
  misc_feature (533)..(551): n is a, c, g, or t
gcctgaatatcagctccctgatcttcagcatcnnnnnnnnnnnnnnnnnnnnnnnnnttttctctaccacctctgtggtagtctttcagtcttttgcacaaagaacaccccattctggattctagctgccctgtgntccacggtccacatntgccccgcccctgccccgcccccaggctcaagcctngaccctttaccctacgcgtatgcaaatgttaccttcacctatctgtccacagtggattcaataaagtgcacggggtggcaantnngannnnaaagaggggagggacagaggggaggaagacaggacgccaagtgagaaaaaagaagaggtctgtttttctcctttgggggtattttgtgcgaggcgtgtttaaggggtggggaacatggtcaacttacttgagaccccttccgagcgatcaggagagggggccggagttgtgtgaacacagcgcgggtatggtgggcggatgttgtgtgcggggcagcggttgtttccgaggtttcttatgggtgcaactcttctnnnnnnnnnnnnnnnnnnntggtttgcgagtgtttttactcttacactcgtttgtgtaaattg

SEQ ID NO: 4198 - DNA, 595 bp, Mus musculus; identical to SEQ ID NO: 4197
  misc_feature (33)..(57): n is a, c, g, or t
  misc_feature (136)..(136): n is a, c, g, or t
  misc_feature (151)..(151): n is a, c, g, or t
  misc_feature (187)..(187): n is a, c, g, or t
  misc_feature (269)..(269): n is a, c, g, or t
  misc_feature (271)..(272): n is a, c, g, or t
  misc_feature (275)..(278): n is a, c, g, or t
  misc_feature (533)..(551): n is a, c, g, or t

SEQ ID NO: 4199 - DNA, 189 bp, Mus musculus
  misc_feature (84)..(84): n is a, c, g, or t
taccagaggtcaggagatatgggtctgggcgtgcccttaaacattgccagctatgctctgctcacctacatgattgcacatatnacaggcctgcagacatttttagccaggtgattttgtccacactttgggagatgcacatatttacctgaatcatatagagccgctgaaaattcagctacagcgaga

SEQ ID NO: 4200 - DNA, 189 bp, Mus musculus; identical to SEQ ID NO: 4199
  misc_feature (84)..(84): n is a, c, g, or t

SEQ ID NO: 4201 - DNA, 189 bp, Mus musculus; identical to SEQ ID NO: 4199
  misc_feature (84)..(84): n is a, c, g, or t

SEQ ID NO: 4202 - DNA, 153 bp, Mus musculus
ctggggctccttgtgagggaattatttttcctgtttctcctttagtatttgtctgctgcagtttaaataagtaaagccttctaagatgtttagtagacagatcaaacaaaatgtttttattttaaagtgagtgtttctcttctcaactgatct

SEQ ID NO: 4203 - DNA, 153 bp, Mus musculus; identical to SEQ ID NO: 4202

SEQ ID NO: 4204 - DNA, 126 bp, Mus musculus
ttaaaacttgaactgtactaggcaaatgcaagattataaatttagctaataggagtttacaaacagttcagatgattatgatttgatttggtttaattgagctgtactagttcatttcataaggaa

SEQ ID NO: 4205 - DNA, 126 bp, Mus musculus; identical to SEQ ID NO: 4204

SEQ ID NO: 4206 - DNA, 336 bp, Mus musculus
  misc_feature (34)..(34): n is a, c, g, or t
cttgtaccagatagagtgcaaaatgtatttatangattaatacctgcccattcccctctcctcatttctcctcccctgtcttgattatggtatcttatcctaactctgaagactgaaggcacatggttccctctaaaaaccactattgataccactgcagaaataagccagcaacaacagggcagcggggtgggcttctcccctctcttcctaaatgcatgttcaaagatgagaccttattgatcttaaacatctgtcagatgagtcatacattggattattttttatatacatgtatacacaatatttcaaattgaaagcaacatctcagtggat

SEQ ID NO: 4207 - DNA, 336 bp, Mus musculus; identical to SEQ ID NO: 4206
  misc_feature (34)..(34): n is a, c, g, or t

SEQ ID NO: 4208 - DNA, 452 bp, Mus musculus
  misc_feature (27)..(27): n is a, c, g, or t
  misc_feature (47)..(47): n is a, c, g, or t
  misc_feature (69)..(84): n is a, c, g, or t
  misc_feature (108)..(122): n is a, c, g, or t
  misc_feature (227)..(227): n is a, c, g, or t
  misc_feature (286)..(286): n is a, c, g, or t
  misc_feature (288)..(288): n is a, c, g, or t
  misc_feature (290)..(292): n is a, c, g, or t
  misc_feature (301)..(301): n is a, c, g, or t
  misc_feature (303)..(356): n is a, c, g, or t
  misc_feature (379)..(379): n is a, c, g, or t
  misc_feature (400)..(400): n is a, c, g, or t
cccagtgatgatactttggggtagaantccttgctggcaggatggtntctgtgacgggatgcgttgaannnnnnnnnnnnnnnnaatggtgaacccaccagtgaggannnnnnnnnnnnnnngttgacggggtttgcttctgtatatttattttatgtacagaactttgtaaaaaaaaaaaaaagttaaatacttaaaaagtaacatttttagcatctttattaaantcaaggaaatttctttgtgagcttgactttgtcagacagtaaacagctttgtatcattnanannnaaaaaaaanannnnnnnnnnnnnnnnnnnnnnnnnnnnnnnnnnnnnnnnnnnnnnnnnnnnnnaaaaaaaaaaaacatcgccgacntatcccttaggtggtaattcntgcatgcgcgtttaactgcatgaacatgggtcactactcgtgcgacccttcg

SEQ ID NO: 4209 - DNA, 452 bp, Mus musculus; identical to SEQ ID NO: 4208
  misc_feature (27)..(27): n is a, c, g, or t
  misc_feature (47)..(47): n is a, c, g, or t
  misc_feature (69)..(84): n is a, c, g, or t
  misc_feature (108)..(122): n is a, c, g, or t
  misc_feature (227)..(227): n is a, c, g, or t
  misc_feature (286)..(286): n is a, c, g, or t
  misc_feature (288)..(288): n is a, c, g, or t
  misc_feature (290)..(292): n is a, c, g, or t
  misc_feature (301)..(301): n is a, c, g, or t
  misc_feature (303)..(356): n is a, c, g, or t
  misc_feature (379)..(379): n is a, c, g, or t
  misc_feature (400)..(400): n is a, c, g, or t

SEQ ID NO: 4210 - DNA, 68 bp, Mus musculus
aagccaaggcgagggctgagattagagctcagatgggcattgggcttggctctgagaatgccgctggg

SEQ ID NO: 4211 - DNA, 68 bp, Mus musculus; identical to SEQ ID NO: 4210

SEQ ID NO: 4212 - DNA, 245 bp, Mus musculus
  misc_feature (67)..(67): n is a, c, g, or t
  misc_feature (97)..(97): n is a, c, g, or t
  misc_feature (105)..(105): n is a, c, g, or t
  misc_feature (182)..(220): n is a, c, g, or t
cagatgagtctgagacttgaatctgaagggtcccatctgtggcctgtaccttgttcccaccctgctnttgctgcccacaccagacttctccagcatnactgtgcnaccctctgctgaagagaagggtgaattaataacagccctagtaagaccagcccagttcagtgatcctcagaatcccnnnnnnnnnnnnnnnnnnnnnnnnnnnnnnnnnnnnnnnacatacatcacagagaagggtctgc

SEQ ID NO: 4213 - DNA, 245 bp, Mus musculus; identical to SEQ ID NO: 4212
  misc_feature (67)..(67): n is a, c, g, or t
  misc_feature (97)..(97): n is a, c, g, or t
  misc_feature (105)..(105): n is a, c, g, or t
  misc_feature (182)..(220): n is a, c, g, or t

SEQ ID NO: 4214 - DNA, 235 bp, Mus musculus
  misc_feature (65)..(88): n is a, c, g, or t
  misc_feature (92)..(92): n is a, c, g, or t
  misc_feature (96)..(96): n is a, c, g, or t
  misc_feature (100)..(100): n is a, c, g, or t
  misc_feature (108)..(136): n is a, c, g, or t
tgctgacaagcttggcctggatatctctgcaacaaaggcagtgcacataagtaatcctaaaaccnnnnnnnnnnnnnnnnnnnnnnnnaccnttcntccnggccttcnnnnnnnnnnnnnnnnnnnnnnnnnnnnngccccttcctctcaaactgtttgaaatctctgacgttgtagtaaaagattctggcaaagatgtaggtgcgaaaaactacaggcatctctgtgctgttta

SEQ ID NO: 4215 - DNA, 235 bp, Mus musculus; identical to SEQ ID NO: 4214
  misc_feature (65)..(88): n is a, c, g, or t
  misc_feature (92)..(92): n is a, c, g, or t
  misc_feature (96)..(96): n is a, c, g, or t
  misc_feature (100)..(100): n is a, c, g, or t
  misc_feature (108)..(136): n is a, c, g, or t

SEQ ID NO: 4216 - DNA, 497 bp, Mus musculus
  misc_feature (176)..(223): n is a, c, g, or t
  misc_feature (331)..(331): n is a, c, g, or t
  misc_feature (356)..(356): n is a, c, g, or t
  misc_feature (358)..(358): n is a, c, g, or t
  misc_feature (372)..(372): n is a, c, g, or t
  misc_feature (392)..(392): n is a, c, g, or t
  misc_feature (399)..(399): n is a, c, g, or t
  misc_feature (430)..(430): n is a, c, g, or t
  misc_feature (432)..(432): n is a, c, g, or t
ggcttcctgctttttcggagcctcccgcggcacacatttggactggtgcagagcaaggtcttcccagtctattttcacgtctccttgggctgtgcttcatcaacctctgcatcttggcaccacagcgagcctggattcacctcacactgtgggaagtcagtcagctttccctgctnnnnnnnnnnnnnnnnnnnnnnnnnnnnnnnnnnnnnnnnnnnnnnnnctcgcaccacggctgtcatgcgggccctgcagagcatagagaaagagcggggcctggggacagaggtgccaggcaacttccagggccctgatccctaccgccagctgngggacaaggaccccaagtacagtgntntacgccggaagttntaccactaccatggcctgtnttccctntgcaacctggggtgcctgctgagcaatgggntntgccttgtgggccttgccctgggactcaggagcctctaacacagaccctgtgtgtcaataaatgc

SEQ ID NO: 4217 - DNA, 497 bp, Mus musculus; identical to SEQ ID NO: 4216
  misc_feature (176)..(223): n is a, c, g, or t
  misc_feature (331)..(331): n is a, c, g, or t
  misc_feature (356)..(356): n is a, c, g, or t
  misc_feature (358)..(358): n is a, c, g, or t
  misc_feature (372)..(372): n is a, c, g, or t
  misc_feature (392)..(392): n is a, c, g, or t
  misc_feature (399)..(399): n is a, c, g, or t
  misc_feature (430)..(430): n is a, c, g, or t
  misc_feature (432)..(432): n is a, c, g, or t

SEQ ID NO: 4218 - DNA, 383 bp, Mus musculus
  misc_feature (36)..(61): n is a, c, g, or t
  misc_feature (194)..(208): n is a, c, g, or t
acttcatctccattgttcagggaacaacaaatggannnnnnnnnnnnnnnnnnnnnnnnnnccttcgggaatgacactaataaaagaccaagacctcctgattgaactggatgtggagtgctctgtaggctgcacattttttggctttgtagttttcctttctcagttaacatctcacactgaaacattccacnnnnnnnnnnnnnnnggggccaactcaagtttacagtcctgactgaaagtcaccctgcttctagcttatctgaaccctgcccctcactcctatttattaagcatcacactaccagggagatgaactttgagcaaactgcaattgataaaatctactctgttctttatgttcttgctattgtatcatacgt

SEQ ID NO: 4219 - DNA, 383 bp, Mus musculus; identical to SEQ ID NO: 4218
  misc_feature (36)..(61): n is a, c, g, or t
  misc_feature (194)..(208): n is a, c, g, or t

SEQ ID NO: 4220 - DNA, 511 bp, Mus musculus
  misc_feature (131)..(148): n is a, c, g, or t
  misc_feature (167)..(168): n is a, c, g, or t
  misc_feature (184)..(185): n is a, c, g, or t
  misc_feature (193)..(193): n is a, c, g, or t
  misc_feature (285)..(299): n is a, c, g, or t
  misc_feature (308)..(322): n is a, c, g, or t
ccctgcagaatctggaagaggcagagaaggctgctgatgagagtgagagaggcatgaaggtaatagagaaccgagccatgaaagatgaggaaaagatggagatcctggagatgcagctcaaagaagccaannnnnnnnnnnnnnnnnncgaccgcaagtatgagganngttgctcgtaagttgnncatcctgnagggtgagctgaagagagcagaggagagggcggaggtatctgaactaaagtgtggtgacctggaagaagagctcaagaatgtaactaacaannnnnnnnnnnnnnnggctgcttnnnnnnnnnnnnnnnaaaaggaggataaatatgaagaagaaatcaagcttctgtctgacaagctgaaggaggctgagacccgagctgagtttgcagaaaggacagtttctaaactggagaagacaatcgatgacctggaagaaaaacttgcccaggccaaagaagagaatgtgggcttacatcagacactggaccagacactaa

SEQ ID NO: 4221 - DNA, 511 bp, Mus musculus; identical to SEQ ID NO: 4220
  misc_feature (131)..(148): n is a, c, g, or t
  misc_feature (167)..(168): n is a, c, g, or t
  misc_feature (184)..(185): n is a, c, g, or t
  misc_feature (193)..(193): n is a, c, g, or t
  misc_feature (285)..(299): n is a, c, g, or t
  misc_feature (308)..(322): n is a, c, g, or t

SEQ ID NO: 4222 - DNA, 352 bp, Mus musculus
  misc_feature (58)..(90): n is a, c, g, or t
  misc_feature (92)..(108): n is a, c, g, or t
ctcccctggacttcagttcgagagactgtcaccctcctggtaacactgggccaacctnnnnnnnnnnnnnnnnnnnnnnnnnnnnnnnnncnnnnnnnnnnnnnnnnnccatgaagctagcccagcgccgcaggtcaagtctgctgagctcttcagccaagtctcccagcgtacggtgcaaggatgaagttgaacgcaaggccccaaacacagggatgctctgtactgctgcggagggaaagaagagggacgctgagtgggaggtacagcggtgactcgtgtgctgtcccttctgtgtgctccccaggggctcgtagtcaaggagaggaacactgaactgtgaactttgttt

SEQ ID NO: 4223 - DNA, 352 bp, Mus musculus; identical to SEQ ID NO: 4222
  misc_feature (58)..(90): n is a, c, g, or t
  misc_feature (92)..(108): n is a, c, g, or t

SEQ ID NO: 4224 - DNA, 287 bp, Mus musculus
  misc_feature (89)..(126): n is a, c, g, or t
caggctgatttgcatatcggggaaggtgattccatccgctttggacgctttgctttggagactcgagccagccctggccacactccagnnnnnnnnnnnnnnnnnnnnnnnnnnnnnnnnnnnnnnttcactggagatgccctgctgatccgagggtgtggacggacagacttccaacaaggctgtgctaagactttgtaccactctgtgcacgagaagatcttcacacttccaggcaactgtctaatctacccggctcacgattaccacgggctcacagtttctac

SEQ ID NO: 4225 - DNA, 287 bp, Mus musculus; identical to SEQ ID NO: 4224
  misc_feature (89)..(126): n is a, c, g, or t

SEQ ID NO: 4226 - DNA, 181 bp, Mus musculus
  misc_feature (51)..(73): n is a, c, g, or t
gtggccatggtagatgcattagcttcgtgagcaccatatgactgagtttcnnnnnnnnnnnnnnnnnnnnnnnactacgcagtggttcttgtgtgagggttcttccagtgggggcgctttaaaaaagtcgctatgttttggtggtgacgggaggtatcgttactgtttcctcccagtttgt

SEQ ID NO: 4227 - DNA, 181 bp, Mus musculus; identical to SEQ ID NO: 4226
  misc_feature (51)..(73): n is a, c, g, or t

SEQ ID NO: 4228 - DNA, 258 bp, Mus musculus
  misc_feature (34)..(50): n is a, c, g, or t
  misc_feature (61)..(61): n is a, c, g, or t
  misc_feature (96)..(96): n is a, c, g, or t
  misc_feature (102)..(118): n is a, c, g, or t
  misc_feature (130)..(130): n is a, c, g, or t
  misc_feature (135)..(135): n is a, c, g, or t
  misc_feature (198)..(198): n is a, c, g, or t
cgtgaccaagaccacacctagatcgtgggtactnnnnnnnnnnnnnnnnntccacatttgntcgtaatctgcttcctgcctagaagcggcaaagcnaggctnnnnnnnnnnnnnnnnnatagcacttatntctgntcctcatggattacgcgctacacatgtgtttgggttttagaaacaggtgcatgtgaagacaantctgagctcagtcagggtagaagcgaaaggctgaaccttccaacgtgctgatcacaaacg

SEQ ID NO: 4229 - DNA, 258 bp, Mus musculus; identical to SEQ ID NO: 4228
  misc_feature (34)..(50): n is a, c, g, or t
  misc_feature (61)..(61): n is a, c, g, or t
  misc_feature (96)..(96): n is a, c, g, or t
  misc_feature (102)..(118): n is a, c, g, or t
  misc_feature (130)..(130): n is a, c, g, or t
  misc_feature (135)..(135): n is a, c, g, or t
  misc_feature (198)..(198): n is a, c, g, or t

SEQ ID NO: 4230 - DNA, 391 bp, Mus musculus
  misc_feature (267)..(267): n is a, c, g, or t
agaagatacccagcttcccgccggacctcggctttccggagcgcaaggagcgagtgatggtggccacacaacaagagatgatggatgcccagctgacactgcagcaacgtgactactgtgcccactacctcatccggctgctgaagtgcaagcgagacagcttccccaacttcctggcctgcaagcacgagcagcacgactgggactactgcgagcacctggattacgtgaaacgcatgaaggagtttgaacgtgagcggcgactgntccaaaggaagaagcgaagggcactgaaggaagcacgggtagcccaaggccagggagaaggagaggtgggccctgaggtggccctgtagggattacccgccagcctgtggacctatcagtgaaa

SEQ ID NO: 4231 - DNA, 391 bp, Mus musculus; identical to SEQ ID NO: 4230
  misc_feature (267)..(267): n is a, c, g, or t

SEQ ID NO: 4232 - DNA, 211 bp, Mus musculus
  misc_feature (63)..(63): n is a, c, g, or t
  misc_feature (126)..(126): n is a, c, g, or t
taatatgcttgatgccggccgtctctagcccaatcctgtcagaagcttgccctgaccagggcnatcttggaagcctttcctttgtctcacgtctgtgaaagtctgtatgtccatacccctgacacntgcaggacagtgtgaactaccttcagcatgctgggctagcttgtgccagccagttcatctgtcctgagcagacatggtccagaat

SEQ ID NO: 4233 - DNA, 211 bp, Mus musculus; identical to SEQ ID NO: 4232
  misc_feature (63)..(63): n is a, c, g, or t
  misc_feature (126)..(126): n is a, c, g, or t

SEQ ID NO: 4234 - DNA, 421 bp, Mus musculus
  misc_feature (92)..(166): n is a, c, g, or t
  misc_feature (184)..(201): n is a, c, g, or t
  misc_feature (205)..(205): n is a, c, g, or t
  misc_feature (213)..(214): n is a, c, g, or t
  misc_feature (217)..(217): n is a, c, g, or t
  misc_feature (219)..(220): n is a, c, g, or t
  misc_feature (222)..(222): n is a, c, g, or t
  misc_feature (226)..(226): n is a, c, g, or t
  misc_feature (228)..(230): n is a, c, g, or t
  misc_feature (233)..(284): n is a, c, g, or t
  misc_feature (306)..(323): n is a, c, g, or t
  misc_feature (329)..(329): n is a, c, g, or t
  misc_feature (331)..(331): n is a, c, g, or t
  misc_feature (369)..(369): n is a, c, g, or t
ttcgatagcgataggagtggcaccgtggatccccaggagctacagaaggccctgacgactatgggattcaggttgagcccccaaactgtgannnnnnnnnnnnnnnnnnnnnnnnnnnnnnnnnnnnnnnnnnnnnnnnnnnnnnnnnnnnnnnnnnnnnnnnnnngggctctcacagatagcnnnnnnnnnnnnnnnnnnggtnaacaaggnnttngnnantttntnnnatnnnnnnnnnnnnnnnnnnnnnnnnnnnnnnnnnnnnnnnnnnnnnnnnnnnnctgaatatattcaacattccannnnnnnnnnnnnnnnnnttcctntntgccttcagtgctgtgtgcagaccccaccgacagccantccctgacaaccgttgaacgggattatgactttatatagagccacagcttca

SEQ ID NO: 4235 - DNA, 421 bp, Mus musculus; identical to SEQ ID NO: 4234
  misc_feature (92)..(166): n is a, c, g, or t
  misc_feature (184)..(201): n is a, c, g, or t
  misc_feature (205)..(205): n is a, c, g, or t
  misc_feature (213)..(214): n is a, c, g, or t
  misc_feature (217)..(217): n is a, c, g, or t
  misc_feature (219)..(220): n is a, c, g, or t
  misc_feature (222)..(222): n is a, c, g, or t
  misc_feature (226)..(226): n is a, c, g, or t
  misc_feature (228)..(230): n is a, c, g, or t
  misc_feature (233)..(284): n is a, c, g, or t
  misc_feature (306)..(323): n is a, c, g, or t
  misc_feature (329)..(329): n is a, c, g, or t
  misc_feature (331)..(331): n is a, c, g, or t
  misc_feature (369)..(369): n is a, c, g, or t

SEQ ID NO: 4236 - DNA, 547 bp, Mus musculus
  misc_feature (74)..(74): n is a, c, g, or t
  misc_feature (294)..(294): n is a, c, g, or t
  misc_feature (296)..(296): n is a, c, g, or t
  misc_feature (315)..(315): n is a, c, g, or t
  misc_feature (337)..(337): n is a, c, g, or t
  misc_feature (340)..(340): n is a, c, g, or t
  misc_feature (344)..(344): n is a, c, g, or t
  misc_feature (363)..(363): n is a, c, g, or t
  misc_feature (377)..(377): n is a, c, g, or t
  misc_feature (380)..(380): n is a, c, g, or t
  misc_feature (387)..(387): n is a, c, g, or t
  misc_feature (403)..(403): n is a, c, g, or t
  misc_feature (408)..(408): n is a, c, g, or t
  misc_feature (415)..(415): n is a, c, g, or t
  misc_feature (444)..(444): n is a, c, g, or t
  misc_feature (447)..(447): n is a, c, g, or t
  misc_feature (480)..(480): n is a, c, g, or t
  misc_feature (483)..(483): n is a, c, g, or t
  misc_feature (485)..(485): n is a, c, g, or t
  misc_feature (491)..(506): n is a, c, g, or t
  misc_feature (517)..(517): n is a, c, g, or t
  misc_feature (519)..(519): n is a, c, g, or t
accatttctgtttggctgcatccttaactccttcatctaggttcagcatcttaagctttcgagagggttttttngttttttgatcttaaattttggtttttggggtttttttatgtttttaaattttttaaggtattcataagaaaaattacttaacatgtatgtataatttaggagtcatttaaagaaaatactcttgttagtccttcaaagtcaaggaattctgagaagccccctaatgtgtcctcccctagctataacccctctagctccttttccagtcttttgcttttntntgcattccttgatctgttntggtgggaacataactgtgaanccncagntgctgcctgcccagagcanccgcgggcaagggntgnttcaagntcctgagcacatagantgggntcctttntattgctgggcccaggggacaggcagttnttntgagaaggactgccctcatgagcaggaccaggntcntnttttannnnnnnnnnnnnnnnggttggaagantntgggctgtttttagaccttttggtcaat

SEQ ID NO: 4237 - DNA, 547 bp, Mus musculus; identical to SEQ ID NO: 4236
  misc_feature (74)..(74): n is a, c, g, or t
  misc_feature (294)..(294): n is a, c, g, or t
  misc_feature (296)..(296): n is a, c, g, or t
  misc_feature (315)..(315): n is a, c, g, or t
  misc_feature (337)..(337): n is a, c, g, or t
  misc_feature (340)..(340): n is a, c, g, or t
  misc_feature (344)..(344): n is a, c, g, or t
  misc_feature (363)..(363): n is a, c, g, or t
  misc_feature (377)..(377): n is a, c, g, or t
  misc_feature (380)..(380): n is a, c, g, or t
  misc_feature (387)..(387): n is a, c, g, or t
  misc_feature (403)..(403): n is a, c, g, or t
  misc_feature (408)..(408): n is a, c, g, or t
  misc_feature (415)..(415): n is a, c, g, or t
  misc_feature (444)..(444): n is a, c, g, or t
  misc_feature (447)..(447): n is a, c, g, or t
  misc_feature (480)..(480): n is a, c, g, or t
  misc_feature (483)..(483): n is a, c, g, or t
  misc_feature (485)..(485): n is a, c, g, or t
  misc_feature (491)..(506): n is a, c, g, or t
  misc_feature (517)..(517): n is a, c, g, or t
  misc_feature (519)..(519): n is a, c, g, or t

SEQ ID NO: 4238 - DNA, 127 bp, Mus musculus
ccgcccgttcagattcagtccggagcccacgcttgaggacatccgacgcctccatgcagagtttgcagctgagcgggactgggagcagttccaccagcctcggaacctgctgctagccttggtggga

SEQ ID NO: 4239 - DNA, 127 bp, Mus musculus; identical to SEQ ID NO: 4238

SEQ ID NO: 4240 - DNA, 584 bp, Mus musculus
  misc_feature (112)..(112): n is a, c, g, or t
  misc_feature (374)..(374): n is a, c, g, or t
  misc_feature (493)..(493): n is a, c, g, or t
  misc_feature (504)..(505): n is a, c, g, or t
ccgagcaagcccagctaggtatggcgatggtgaagcggttctttgaatcttaccatgaggtccccgacggcacccagtgtcatcgcaagacctacatcaccacggccttagncggcatttgcggcataatcggctccgcttacagcgtctcactcaaccccgcagattccaccctggaagcagtggccagagtcggccggtacacattcactgcagctgctattggagcgatgtttggccttaccacctgtgtcagtgcccaggtccgagagaagccagatgaccccctgaactacttcattggtggctgcgcgggaggcctgacattgggagctcgcactcacagctatgggacagcagccatgggctgtgtntacatgggcactgcggccgccctgttcaagatcggcaagctggaaggctgggagttgttccctacccccaaggtgtgagccaaacccctgtgacaaataaacgctgtatgttcctgtgngcaatgtcttnnaggcaggcttgctgcatgagatggccaattgggagggggtatagcagaaggcagataagatgacagaggcctgggcctg

SEQ ID NO: 4241 - DNA, 584 bp, Mus musculus; identical to SEQ ID NO: 4240
  misc_feature (112)..(112): n is a, c, g, or t
  misc_feature (374)..(374): n is a, c, g, or t
  misc_feature (493)..(493): n is a, c, g, or t
  misc_feature (504)..(505): n is a, c, g, or t

SEQ ID NO: 4242 - DNA, 396 bp, Mus musculus
cacgtcattaagctgaaaagtttaaaacttatgacatattgccaagaaattgtgttttagtactgggtgaatgattttgtttgatcaaaatcatagctttgtaaacatctttggaatatttttctatttgttgactttctaggtcttcgtatgaatttatttttggtgtgtgtttgtgtgtagtcactcttttgcacttatctttatctagagattgactaatacctcattctttttgtaaaagcagccagtaatttctgtgtaaccttattatgtgcaatattttaaattttaagaaatgtgtgcttcttttgttgttagagttatttctttagttctgcacttttccatgttatactccatacgagtattaatcctatggatgcatatgaaaac

SEQ ID NO: 4243 - DNA, 396 bp, Mus musculus; identical to SEQ ID NO: 4242

SEQ ID NO: 4244 - DNA, 534 bp, Mus musculus
  misc_feature (28)..(43): n is a, c, g, or t
  misc_feature (64)..(286): n is a, c, g, or t
ggactttgaccctgccatcaatgagtannnnnnnnnnnnnnnnttccctccggatggttcagcnnnnnnnnnnnnnnnnnnnnnnnnnnnnnnnnnnnnnnnnnnnnnnnnnnnnnnnnnnnnnnnnnnnnnnnnnnnnnnnnnnnnnnnnnnnnnnnnnnnnnnnnnnnnnnnnnnnnnnnnnnnnnnnnnnnnnnnnnnnnnnnnnnnnnnnnnnnnnnnnnnnnnnnnnnnnnnnnnnnnnnnnnnnnnnnnnnnnnnnnnnnnnnnnnnnnnnnnnnnnnnnaaggcaccagtcgtcatggggtcctctgaagatgtgcaggagttcctggagatctacaggaagcacaaagccaagtgaaggccagccttgcccctgccccagagcagagctcaagtgacgctactccattctgcatgttgtacattcctagaaacaaacctaacagcgtggatagtttcacagcttaatgctttgcaatgcccaaggtcacttcatcctcatgctataatgccactgtatcaggtaat

SEQ ID NO: 4245 - DNA, 534 bp, Mus musculus; identical to SEQ ID NO: 4244
  misc_feature (28)..(43): n is a, c, g, or t
  misc_feature (64)..(286): n is a, c, g, or t

SEQ ID NO: 4246 - DNA, 574 bp, Mus musculus
  misc_feature (33)..(33): n is a, c, g, or t
  misc_feature (35)..(35): n is a, c, g, or t
  misc_feature (45)..(45): n is a, c, g, or t
  misc_feature (70)..(70): n is a, c, g, or t
  misc_feature (113)..(113): n is a, c, g, or t
  misc_feature (217)..(217): n is a, c, g, or t
  misc_feature (230)..(231): n is a, c, g, or t
  misc_feature (233)..(235): n is a, c, g, or t
  misc_feature (237)..(294): n is a, c, g, or t
  misc_feature (304)..(304): n is a, c, g, or t
  misc_feature (326)..(326): n is a, c, g, or t
  misc_feature (330)..(349): n is a, c, g, or t
  misc_feature (422)..(422): n is a, c, g, or t
gtgaaattcggcacaatcactgtaatcatggantntgtgttgctntaaattgacaacttgacttttaatntgcaattcctagaaagcttcccgtttttaccaaacttcatttntggatattggtatattgccattatggagatttaaaacacctctaattttaaataccaacaaaattggttgtaatcaaattttaaatcaataataataatttggncctcccccctttnnannnannnnnnnnnnnnnnnnnnnnnnnnnnnnnnnnnnnnnnnnnnnnnnnnnnnnnnnnnntgcaaatgcntttacgtgaacgtagaggccgngttnnnnnnnnnnnnnnnnnnnnaaatcgatatggtttaccccctttacttaccaaaaatggggtgagatttaccaaaaaatgtgcccccttatanaaaaacagcgcggggattccccctgggggggtatcgcggccggggtatacagggggggggacaatgggccgagcacctgtcccccgtcgacgacacgtagcgctcatcggggggcggaaaccccggtctctttctcgtcgagagggttccct

SEQ ID NO: 4247 - DNA, 574 bp, Mus musculus; identical to SEQ ID NO: 4246
  misc_feature (33)..(33): n is a, c, g, or t
  misc_feature (35)..(35): n is a, c, g, or t
  misc_feature (45)..(45): n is a, c, g, or t
  misc_feature (70)..(70): n is a, c, g, or t
  misc_feature (113)..(113): n is a, c, g, or t
  misc_feature (217)..(217): n is a, c, g, or t
  misc_feature (230)..(231): n is a, c, g, or t
  misc_feature (233)..(235): n is a, c, g, or t
  misc_feature (237)..(294): n is a, c, g, or t
  misc_feature (304)..(304): n is a, c, g, or t
  misc_feature (326)..(326): n is a, c, g, or t
  misc_feature (330)..(349): n is a, c, g, or t
  misc_feature (422)..(422): n is a, c, g, or t

SEQ ID NO: 4248 - DNA, 192 bp, Mus musculus
ttctgaccttttcaaacggtttgagaagcggaaggaagtgattgaaggctaccagaagaatgaagagtcactgaagaagtatgttggggaatgcatagtgaaaattgaaaaagaaggccagaggtaccaggcgctgaagatccatgcagaagaaaagctcaggctggcaaatgaggagatcgcccaggtaca

SEQ ID NO: 4249 - DNA, 192 bp, Mus musculus; identical to SEQ ID NO: 4248

SEQ ID NO: 4250 - DNA, 121 bp, Mus musculus
agatgcctcactgtggcagcatggcatggagagggaactctcatgctgctagccagaccccttgtgatagagactgtgtgcaaagacagtgcttcccttaactccctggagaacctgaaca

SEQ ID NO: 4251 - DNA, 121 bp, Mus musculus; identical to SEQ ID NO: 4250

SEQ ID NO: 4252 - DNA, 162 bp, Mus musculus
caattacgtggaacccaccattgtgaccggtcttgcccatgatgcgcccattgttcaccaggagacttttgccccaatcctctatgtcttcaaattccaggatgaagaagaggtctttgaatggaacaatgaagtaaaacagggactttcaagtagtatctt

SEQ ID NO: 4253 - DNA, 162 bp, Mus musculus; identical to SEQ ID NO: 4252

SEQ ID NO: 4254 - DNA, 540 bp, Mus musculus
  misc_feature (28)..(42): n is a, c, g, or t
  misc_feature (285)..(285): n is a, c, g, or t
  misc_feature (290)..(290): n is a, c, g, or t
  misc_feature (306)..(306): n is a, c, g, or t
  misc_feature (315)..(340): n is a, c, g, or t
  misc_feature (346)..(346): n is a, c, g, or t
  misc_feature (349)..(349): n is a, c, g, or t
  misc_feature (357)..(357): n is a, c, g, or t
  misc_feature (361)..(361): n is a, c, g, or t
  misc_feature (390)..(390): n is a, c, g, or t
  misc_feature (419)..(419): n is a, c, g, or t
tgcctgactgagataaatgtgtactgannnnnnnnnnnnnnnagggatcgccaaaggattggctttgtttccttgtttcagtaattggaactcctgctgtcagtctctaaagaattctctttgcaaactatgccaggttcaaaataaatgcttatttttaaaaatgaaatctatatattgactttttatcaatcatctattgtgcaatcaaaattagagttcttgagtttaaaaacaacgcatagggcctccagataactattaagacttatttagcttagtggntggtnttttcatgcaaataancaagggtgnnnnnnnnnnnnnnnnnnnnnnnnnngttctnttntaaccctntctntactgtgcgtgtgtataccatatgtgaantccttagagactttgaggttgattgatanttttgtgcagctgtgctttgactaacgccatcacagtgttaaacacgaggacgggcagcgctgatcatggggttctgactattttgttttttttcccttactgctgtaacttaagtttttg

SEQ ID NO: 4255 - DNA, 540 bp, Mus musculus; identical to SEQ ID NO: 4254
  misc_feature (28)..(42): n is a, c, g, or t
  misc_feature (285)..(285): n is a, c, g, or t
  misc_feature (290)..(290): n is a, c, g, or t
  misc_feature (306)..(306): n is a, c, g, or t
  misc_feature (315)..(340): n is a, c, g, or t
  misc_feature (346)..(346): n is a, c, g, or t
  misc_feature (349)..(349): n is a, c, g, or t
  misc_feature (357)..(357): n is a, c, g, or t
  misc_feature (361)..(361): n is a, c, g, or t
  misc_feature (390)..(390): n is a, c, g, or t
  misc_feature (419)..(419): n is a, c, g, or t

SEQ ID NO: 4256 - DNA, 385 bp, Mus musculus
  misc_feature (100)..(115): n is a, c, g, or t
tgaggtccagttggagactgcattgcatagtgtcacccgcttgcctccattctgtgttcactatagtttcagttacagccagaataggaaggctccattnnnnnnnnnnnnnnnngggtcattcatgaagtttattgtaagatattttgcatgtatctctggacaagcctaggctgtccacttctgagcaactggaatctagggtcttggtgtttctcctcataccactgcctttccagtggtgcttacccaggagcctgttggcacccacccaggagttgcccatcagaacaggcaactatttcctaagagccaggctctgagccgtagacccatagcaggtaacacgtgcatcgtgtttgcataacaagtacggctgtgattt

SEQ ID NO: 4257 - DNA, 385 bp, Mus musculus; identical to SEQ ID NO: 4256
  misc_feature (100)..(115): n is a, c, g, or t

SEQ ID NO: 4258 - DNA, 312 bp, Mus musculus
  misc_feature (60)..(116): n is a, c, g, or t
  misc_feature (118)..(118): n is a, c, g, or t
  misc_feature (121)..(122): n is a, c, g, or t
  misc_feature (124)..(128): n is a, c, g, or t
  misc_feature (130)..(130): n is a, c, g, or t
  misc_feature (132)..(135): n is a, c, g, or t
  misc_feature (137)..(147): n is a, c, g, or t
  misc_feature (280)..(280): n is a, c, g, or t
gtgtgcctccttgcattgtgtattttttctttgcattttaatatcactatgtagtgtgtnnnnnnnnnnnnnnnnnnnnnnnnnnnnnnnnnnnnnnnnnnnnnnnnnnnnnnnnntnggnntnnnnntntnnnncnnnnnnnnnnnctgtcttctttcagcagaggcatgtgcacccaacatgcacatgattaagcaggctcttccccagtacgtgttttctgagccatgcataccctctccttggccttaggtttactctcaagtgttccctctattntcatgcgtcccactttgggtctgtacaatcat

SEQ ID NO: 4259 - DNA, 615 bp, Mus musculus
  misc_feature (231)..(231): n is a, c, g, or t
  misc_feature (438)..(438): n is a, c, g, or t
  misc_feature (457)..(457): n is a, c, g, or t
  misc_feature (464)..(464): n is a, c, g, or t
  misc_feature (467)..(467): n is a, c, g, or t
  misc_feature (522)..(522): n is a, c, g, or t
  misc_feature (528)..(528): n is a, c, g, or t
  misc_feature (551)..(551): n is a, c, g, or t
  misc_feature (555)..(555): n is a, c, g, or t
  misc_feature (558)..(590): n is a, c, g, or t
catgtgggtcccttctcccactgaggccagaggagggcatagactccactggaactagaggtgtaggtggtagtgagacagtgtggggactggatatcagacactgggctttgcaagagcagcaagaattcttgagggcaattggatttagaattatcaacatgagtattacagatctggaaatctgagatttcctgggcgtgcgttactcgctgcagtccttgctatggnaacctggtcagtctgtattcgtaatgccgaaagacaagttaactctgtagacttagaagaaattcttttgactgagattttattgaaaagtttttaaatagccgcatgtgattcagttgtcccccaaccacagctttagtccaaaagaaccaagttaggatatttgtgctttacccagatggtaattataacagacagtaatagganaaccgacttagcaatgagnaagaganatntgtatctgttacgcaggtatataggccagtctggataatcgacagagtagtaacntgaganctggtctcgtcgtgggttaatgnaganacnnnnnnnnnnnnnnnnnnnnnnnnnnnnnnnnnttcatgctgctaccaaactgatagg

SEQ ID NO: 4260 - DNA, 615 bp, Mus musculus; identical to SEQ ID NO: 4259
  misc_feature (231)..(231): n is a, c, g, or t
  misc_feature (438)..(438): n is a, c, g, or t
  misc_feature (457)..(457): n is a, c, g, or t
  misc_feature (464)..(464): n is a, c, g, or t
  misc_feature (467)..(467): n is a, c, g, or t
  misc_feature (522)..(522): n is a, c, g, or t
  misc_feature (528)..(528): n is a, c, g, or t
  misc_feature (551)..(551): n is a, c, g, or t
  misc_feature (555)..(555): n is a, c, g, or t
  misc_feature (558)..(590): n is a, c, g, or t

SEQ ID NO: 4261 - DNA, 548 bp, Mus musculus
  misc_feature (48)..(48): n is a, c, g, or t
  misc_feature (50)..(50): n is a, c, g, or t
  misc_feature (75)..(75): n is a, c, g, or t
  misc_feature (96)..(96): n is a, c, g, or t
  misc_feature (140)..(140): n is a, c, g, or t
  misc_feature (224)..(224): n is a, c, g, or t
  misc_feature (294)..(294): n is a, c, g, or t
  misc_feature (447)..(447): n is a, c, g, or t
tcttcttatctctggggacgacggagtgcatcctgctagcagtgatgncntttgaccgctatgtggctgtgtgcnagcccctgcactatgccaccntcatccaccctcgcctgtgttgccagctggcagctgtggcctgnacgattggcctagtggagtcagtagttcagacgccatccactctgcgcctgcccttctgtccccaccatcaggttgacgacttngtgtgtgaggtccctgctttgattcgactgtcctgtggggacaccacctataatgagatacaaatggctnttgccagtgtcttcatcttggttgtacctctgagcctcatccttgtctcttatggtgccattgccagggcagtgctgaggataagctctgcaaaggggcgcaggaaagcttttgggacctgctcttcccacctcattgtggtcactctcttcnacagctcagtcatcgctgtttatctgcagcccaagaatccttatgctcgagagaggggcaagttctttggtctcttctatgctgtgggaactccttctctt

SEQ ID NO: 4262 - DNA, 520 bp, Mus musculus
  misc_feature (26)..(26): n is a, c, g, or t
  misc_feature (28)..(30): n is a, c, g, or t
  misc_feature (32)..(33): n is a, c, g, or t
  misc_feature (42)..(44): n is a, c, g, or t
  misc_feature (48)..(48): n is a, c, g, or t
  misc_feature (312)..(312): n is a, c, g, or t
  misc_feature (327)..(327): n is a, c, g, or t
  misc_feature (411)..(429): n is a, c, g, or t
acgtgttcaaggtacattcagctccngnnngnngacgaggannncctnaaagaagcagtggccactaaagggcctgtctctgtgggcatcgacgccagccattcctccttcttcttctacaaaagcggtgtctatgacgacccctcctgtacgggcaatgtgaatcatggtgttcttgtggttggctatgggactcttgatggcaaagattactggcttgtgaaaaacagttggggccttaactttggtgatcaaggatacattcggatggcaagaaataataaaaatcactgcggaattgctagttattgntcttacccagaaatntaaaccatttcttctttttctaacaagtcacaaagatggaatatactctaacttaatttgcctgcaatatccagaggaaccaannnnnnnnnnnnnnnnnnntagttactgtactaactaggttatagctatttttacaccctgttgtctagtgttttctaataaccatttgtaacatgatagccccaaagtg

SEQ ID NO: 4263 - DNA, 520 bp, Mus musculus; identical to SEQ ID NO: 4262
  misc_feature (26)..(26): n is a, c, g, or t
  misc_feature (28)..(30): n is a, c, g, or t
  misc_feature (32)..(33): n is a, c, g, or t
  misc_feature (42)..(44): n is a, c, g, or t
  misc_feature (48)..(48): n is a, c, g, or t
  misc_feature (312)..(312): n is a, c, g, or t
  misc_feature (327)..(327): n is a, c, g, or t
  misc_feature (411)..(429): n is a, c, g, or t

SEQ ID NO: 4264 - DNA, 400 bp, Mus musculus
tcttcctgtccttgggaaccaccgagtgcatcctcctgacagtgatgtcttttgaccgctatgtggctgtctgccagcccctgcactatgccaccgtcatccaccctcgcctgtgctggaagctggcagctgtggcctggatgatgggactgcttcaatccatagttcagacacctcctaccctcaagctgcccttctgtccccataggcagatagatgacttcctgtgtgaagtcccatctttaattcgactctcctgtggggacaccacttttaatgagattcagttggctgtgtccagtgttattcttgtggttgtgcctctgagcctcatccttgtctcttacggagccattgccagggcagtgatgaggataaactccactgaagcatggaaaaa

SEQ ID NO: 4265 - DNA, 397 bp, Mus musculus
  misc_feature (274)..(292): n is a, c, g, or t
ttcatagcagcgttgcctgccttcttgctgtctatcagcctttcttgcctcttccttttcgccttccctgttcttccctttctcaaacaaacaagacatggcaaaccgcagtctaacccagccctttgaaattatccatagttttacagacagctccaggctatgagccacaatgtccaaaattattcttgagcactgatataaattacttagaccttctttgagggcagaactcagctgttgctctcatgatgggcagtgctggaaagggttnnnnnnnnnnnnnnnnnnnagtccacgagtttactgagtgcttacaggtaaaggaatgaatataagatgtctttctgatcagaacaggtgtcccttcacatgagctttactagactctgggagg

SEQ ID NO: 4266 - DNA, 397 bp, Mus musculus; identical to SEQ ID NO: 4265
  misc_feature (274)..(292): n is a, c, g, or t

SEQ ID NO: 4267 - DNA, 220 bp, Mus musculus
  misc_feature (107)..(107): n is a, c, g, or t
  misc_feature (155)..(170): n is a, c, g, or t
aattttgctcacttgacatggactaccatgatgcatgtggtagaacttttggttcacagccattgaaatcccctacacaatgttttccagaaaccccttatgaatgntcttgaatggagactttatttcaaataaaagctgtgtttcttaaggtnnnnnnnnnnnnnnnnagttttatcactaaagtccacttatcagacgcaaaatctaggcatggtaa

SEQ ID NO: 4268 - DNA, 220 bp, Mus musculus; identical to SEQ ID NO: 4267
  misc_feature (107)..(107): n is a, c, g, or t
  misc_feature (155)..(170): n is a, c, g, or t

SEQ ID NO: 4269 - DNA, 329 bp, Mus musculus
  misc_feature (175)..(189): n is a, c, g, or t
  misc_feature (210)..(210): n is a, c, g, or t
agttagtcagggaaggctcctgactcttttccttgatcagtggggatagcagttgctatttaatgttgtcttcctccttgcaataatttaacatagaattcaagatctcatcgaaacaaagctgtgacactcatggcactgtccgtgtgtgacctgtgttgctgtgacactcacnnnnnnnnnnnnnnntgacctgagttggcacaagcnacagacacccccaacccccccacctcccagcctggcttctgagacatcactcagggctcttgtgaaagtcccagcgtcaatgccttccctcctggtcactgtgaatcctgctggctgct

SEQ ID NO: 4270 - DNA, 329 bp, Mus musculus; identical to SEQ ID NO: 4269
  misc_feature (175)..(189): n is a, c, g, or t
  misc_feature (210)..(210): n is a, c, g, or t

SEQ ID NO: 4271 - DNA, 221 bp, Mus musculus
  misc_feature (45)..(45): n is a, c, g, or t
  misc_feature (51)..(51): n is a, c, g, or t
  misc_feature (53)..(54): n is a, c, g, or t
  misc_feature (57)..(57): n is a, c, g, or t
  misc_feature (79)..(80): n is a, c, g, or t
  misc_feature (86)..(87): n is a, c, g, or t
  misc_feature (91)..(91): n is a, c, g, or t
  misc_feature (94)..(94): n is a, c, g, or t
  misc_feature (100)..(102): n is a, c, g, or t
  misc_feature (104)..(105): n is a, c, g, or t
  misc_feature (107)..(107): n is a, c, g, or t
  misc_feature (109)..(109): n is a, c, g, or t
  misc_feature (148)..(162): n is a, c, g, or t
  misc_feature (187)..(187): n is a, c, g, or t
cgaaggggtccagacctgcagatgagaggcagtcagcatccgagntagacntnntcntccagaggcaccagggcctccnngaaaanntggntgnggagannntnngncntggcccgcagcctcaagaccaacacactggctgcccagnnnnnnnnnnnnnnngacaatcagaccctgtcacattcantcaagatggcagaccagaacctggagaagctgaa

SEQ ID NO: 4272 - DNA, 221 bp, Mus musculus; identical to SEQ ID NO: 4271
  misc_feature (45)..(45): n is a, c, g, or t
  misc_feature (51)..(51): n is a, c, g, or t
  misc_feature (53)..(54): n is a, c, g, or t
  misc_feature (57)..(57): n is a, c, g, or t
  misc_feature (79)..(80): n is a, c, g, or t
  misc_feature (86)..(87): n is a, c, g, or t
  misc_feature (91)..(91): n is a, c, g, or t
  misc_feature (94)..(94): n is a, c, g, or t
  misc_feature (100)..(102): n is a, c, g, or t
  misc_feature (104)..(105): n is a, c, g, or t
  misc_feature (107)..(107): n is a, c, g, or t
  misc_feature (109)..(109): n is a, c, g, or t
  misc_feature (148)..(162): n is a, c, g, or t
  misc_feature (187)..(187): n is a, c, g, or t

SEQ ID NO: 4273 - DNA, 512 bp, Mus musculus
  misc_feature (229)..(243): n is a, c, g, or t
  misc_feature (258)..(391): n is a, c, g, or t
  misc_feature (482)..(482): n is a, c, g, or t
gctctttcgctttgacaacgctgtttctggaagttggccattttaagatgaaccagagcacctacctaaaagtgtatgcagagagtaagtgtggtcacgtcaagttcatgtatacggttcagagtgatgtggttttggcacagtctcactatggagctcaggctggctttggactcactatgcagcaggacagtcatccttccaaggcctgggaatacagacatcatcnnnnnnnnnnnnnnngaaatagaactttgnnnnnnnnnnnnnnnnnnnnnnnnnnnnnnnnnnnnnnnnnnnnnnnnnnnnnnnnnnnnnnnnnnnnnnnnnnnnnnnnnnnnnnnnnnnnnnnnnnnnnnnnnnnnnnnnnnnnnnnnnnnnnnnnnnnnnnaacaaaagaaatagaactttgtaacaaagagctaacccctaatagaaaattagaaaaaaatgctactttaagaaattttttttcttgtacntttctccaactcattgtagaaatagaaacg

SEQ ID NO: 4274 - DNA, 512 bp, Mus musculus; identical to SEQ ID NO: 4273
  misc_feature (229)..(243): n is a, c, g, or t
  misc_feature (258)..(391): n is a, c, g, or t
  misc_feature (482)..(482): n is a, c, g, or t

SEQ ID NO: 4275 - DNA, 311 bp, Mus musculus
  misc_feature (26)..(26): n is a, c, g, or t
  misc_feature (103)..(103): n is a, c, g, or t
  misc_feature (107)..(107): n is a, c, g, or t
  misc_feature (123)..(123): n is a, c, g, or t
  misc_feature (146)..(146): n is a, c, g, or t
  misc_feature (155)..(155): n is a, c, g, or t
  misc_feature (200)..(200): n is a, c, g, or t
cagaattccagtgaaaacttgcccantccgagaacagacaagcccaagatcggaagttgttcctttctgccttcagcccttaatcatcaaagcccttcaaggnaccnccggggagacagggangaagcaggaaggacttttaaccncagtgggancattacttttgatgagattgtcaacattgcccggcagatgagatnccggtcttttgctaggagactttctggaactatcaaggagaatctgggtactgcacagtctgtgggctgcaatgtggattgccgccaccctcatgaccatcataggttgcc

SEQ ID NO: 4276 - DNA, 311 bp, Mus musculus; identical to SEQ ID NO: 4275
  misc_feature (26)..(26): n is a, c, g, or t
  misc_feature (103)..(103): n is a, c, g, or t
  misc_feature (107)..(107): n is a, c, g, or t
  misc_feature (123)..(123): n is a, c, g, or t
  misc_feature (146)..(146): n is a, c, g, or t
  misc_feature (155)..(155): n is a, c, g, or t
  misc_feature (200)..(200): n is a, c, g, or t

SEQ ID NO: 4277 - DNA, 311 bp, Mus musculus; identical to SEQ ID NO: 4275
  misc_feature (26)..(26): n is a, c, g, or t
  misc_feature (103)..(103): n is a, c, g, or t
  misc_feature (107)..(107): n is a, c, g, or t
  misc_feature (123)..(123): n is a, c, g, or t
  misc_feature (146)..(146): n is a, c, g, or t
  misc_feature (155)..(155): n is a, c, g, or t
  misc_feature (200)..(200): n is a, c, g, or t

SEQ ID NO: 4278 - DNA, 249 bp, Mus musculus
  misc_feature (58)..(58): n is a, c, g, or t
gacagcttggaagttgagagacctaatgaaagaatacaagaaaaagcgcttggaaganataggcagggtggtcctcgacaaactccggtctagcacggcagcgggagtttttacacagaccgaatcaagccagaggatccggcgctgcctggggggctccgcgggatcgaatgcgttgggaacccctttccaaaccgaagggctggctgtctctccgggatctagaggaacgggccacacggatctagt

SEQ ID NO: 4279 - DNA, 249 bp, Mus musculus; identical to SEQ ID NO: 4278
  misc_feature (58)..(58): n is a, c, g, or t

SEQ ID NO: 4280 - DNA, 347 bp, Mus musculus
  misc_feature (29)..(29): n is a, c, g, or t
  misc_feature (35)..(35): n is a, c, g, or t
  misc_feature (67)..(67): n is a, c, g, or t
gccaccttgtaatggcatatatggcttcncacagntaagccttctttgctgtaccttttaacttcanaattttattgagaccagtcctcacctacagtgtgcagttatgatttttaaaaaagagacagtattttaaagaattctgaccagtgggaatgagattctgaactgccattaactcttgtgttgatatgtatatagagagttcaaagcatgtgactatttacccgatgcacttaataatacaaaatttgacagaagaaagcactgttgatgaaaaatccagctctattaaacactaatgcctctaactgcgaattcccctcatgttccattactatagggga

SEQ ID NO: 4281 - DNA, 347 bp, Mus musculus; identical to SEQ ID NO: 4280
  misc_feature (29)..(29): n is a, c, g, or t
  misc_feature (35)..(35): n is a, c, g, or t
  misc_feature (67)..(67): n is a, c, g, or t

SEQ ID NO: 4282 - DNA, 475 bp, Mus musculus
  misc_feature (80)..(81): n is a, c, g, or t
  misc_feature (425)..(425): n is a, c, g, or t
cctacttggtaagatctagaaaatggccaagaagaaaggaatgtgcgtgacacacatgcacacacacaggaaaaacaccnncacacctcaagtaaaactaagctaagacatttagctaaagggacgccggcttccagcgcgtggactctccagcgttgtcctgcacagaaccatttactgagtctagctgtaatcctggctgcctgacaggatggctttgctgatgtgcaaagctgccagctttgtaaagagggcccttgtactgcacagagggtgacccagggaacctaattcaggcaagtgtgtgtgcccccagttttcaggggcagcaatggcagtgagaggtgctgtgctcaccagtggcagccccgctgggcagttcctggctgggcagcctctggcactggttctccacacacccactnttacctaatactccagtaaaccctccctgcttcagttagccataactctg

SEQ ID NO: 4283 - DNA, 475 bp, Mus musculus; identical to SEQ ID NO: 4282
  misc_feature (80)..(81): n is a, c, g, or t
  misc_feature (425)..(425): n is a, c, g, or t

SEQ ID NO: 4284 - DNA, 452 bp, Mus musculus
  misc_feature (34)..(34): n is a, c, g, or t
  misc_feature (77)..(77): n is a, c, g, or t
  misc_feature (159)..(159): n is a, c, g, or t
  misc_feature (404)..(404): n is a, c, g, or t
  misc_feature (406)..(406): n is a, c, g, or t
  misc_feature (410)..(410): n is a, c, g, or t
  misc_feature (415)..(416): n is a, c, g, or t
gaaacagaaacttgcctcttgcctattctgtctngtctcttcttgccgctgccccgacctcccagaccctaagtcantacgctgagaatcaaggtactttcgcatcctgcagacacttgctgcgctgtgactttgtgtctgacaaacacaaccattgtnggaaagtgattgtgtgaactgctgtccggggactttgggacctttgccataatgaaaagccatcaagtgcatgggtcaccgagtcacagcttccccagggaggtgtgagcattgcccaggtgttccctgctctgtcctgcatggcttcagctgaaatgagctggacaacaaaaccacacattttggtaaattttataattagccatatcttcgtatgaattcatgttctttgtaaaaataaaaancnatancattnngatgagtcttttgtttttcctttatgcaggtacaac

SEQ ID NO: 4285 - DNA, 452 bp, Mus musculus; identical to SEQ ID NO: 4284
  misc_feature (34)..(34): n is a, c, g, or t
  misc_feature (77)..(77): n is a, c, g, or t
  misc_feature (159)..(159): n is a, c, g, or t
  misc_feature (404)..(404): n is a, c, g, or t
  misc_feature (406)..(406): n is a, c, g, or t
  misc_feature (410)..(410): n is a, c, g, or t
  misc_feature (415)..(416): n is a, c, g, or t

SEQ ID NO: 4286 - DNA, 266 bp, Mus musculus
  misc_feature (197)..(197): n is a, c, g, or t
cagttttctattcttacaaaagtggaaactgaggcacggatctagttctgtctctgaaaaaaacctggtgtcacaaatgttcccatttctgagggtggagtgctgagggacctgatgagtcctctgtttccttcatggaagcctcccaatattgccttttatatttaatttatgagaattttgctcattaggatggntgtttgctttgaaatcaatgctgctgtggaaaccaattttaacttttacaaatcttgcttatggacttg

SEQ ID NO: 4287 - DNA, 266 bp, Mus musculus; identical to SEQ ID NO: 4286
  misc_feature (197)..(197): n is a, c, g, or t

SEQ ID NO: 4288 - DNA, 378 bp, Mus musculus
  misc_feature (256)..(256): n is a, c, g, or t
actcaaggtcatgatggtaatacaaaccaaggcaggcactggaaacaggagagccacggagaacaccatggacactgatgctggttctttcatgtccttgtcacctcctatggctacaatacaacaatgaccagaaccaagttgagatgggaagggtttattgcaccttccaggacacaatgcagggtcaaggtgagcaagccagaaagcagacttcctccacggtctctactctgctcctgccttgcgctccttntgcattggcacccttgacaaaagcctcccctagtcagccttggtcagcattttatcacatcacgggaagaaactaggacccttgacaaagtcaataaaacaggtaaagctcgaggcaactga

SEQ ID NO: 4289 - DNA, 378 bp, Mus musculus; identical to SEQ ID NO: 4288
  misc_feature (256)..(256): n is a, c, g, or t

SEQ ID NO: 4290 - DNA, 325 bp, Mus musculus
ctctcaaagccttacagtcctgcagaagaatcctatatgccttagcctctgcatgctagtttctattatgagatgttgtttccttatatatggaaaacaataaacagaagcgtcatgcatatggcgttactgtttgcaatgaggatgtgtttcagaatgctccgttctgaatccacttctgtccctcaggaaaacctgctaaacttgggtcatgggagttaattttattgatattctacatatttctgtcatgcagattatccattaacataccaataccagatcataaatgattccatgttgtagtgtgacattccagtaattc

SEQ ID NO: 4291 - DNA, 325 bp, Mus musculus; identical to SEQ ID NO: 4290

SEQ ID NO: 4292 - DNA, 535 bp, Mus musculus
  misc_feature (258)..(258): n is a, c, g, or t
  misc_feature (265)..(265): n is a, c, g, or t
tacttggggataatgtgctgtacacacaccatacagaacatacaaacatcttaaaagagcacataaacagtgtacaaggaaaggatccaagcccttcatcttcttttccttccttaacacctttactacacctatcttattttcatcagcaaaaattataacaatagtatgtgattataacaatagtatgtgattgttcttttttcctaccttagtcttttccattctccctcccttgttctttctttccttcttctntttcatntctttctgttggtcccttcctttcctccattttactctattcctacagcttcctctgcccttaatccctcagatacccccaaagtatttgtttcttatctagagcttgaccacaaattattttatccttactcctaatacatttttatgccataattcctaagaagtattccctgtatgcgtttcccaaaattttaccatcaatattcctgggactagcatagataaagtgatgttcttagttatctctattctaatctggagagacaaa

SEQ ID NO: 4293 - DNA, 535 bp, Mus musculus; identical to SEQ ID NO: 4292
  misc_feature (258)..(258): n is a, c, g, or t
  misc_feature (265)..(265): n is a, c, g, or t

SEQ ID NO: 4294 - DNA, 525 bp, Mus musculus
  misc_feature (247)..(247): n is a, c, g, or t
  misc_feature (254)..(254): n is a, c, g, or t
aatgtgctgtacacacaccatacagaacatacaaacatcttaaaagagcacataaacagtgtacaaggaaaggatccaagcccttcatcttcttttccttccttaacacctttactacacctatcttattttcatcagcaaaaattataacaatagtatgtgattataacaatagtatgtgattgttcttttttcctaccttagtcttttccattctccctcccttgttctttctttccttcttctntttcatntctttctgttggtcccttcctttcctccattttactctattcctacagcttcctctgcccttaatccctcagatacccccaaagtatttgtttcttatctagagcttgaccacaaattattttatccttactcctaatacatttttatgccataattcctaagaagtattccctgtatgcgtttcccaaaattttaccatcaatattcctgggactagcatagataaagtgatgttcttagttatctctattctaatctggagagacaaaa

SEQ ID NO: 4295 - DNA, 525 bp, Mus musculus; identical to SEQ ID NO: 4294
  misc_feature (247)..(247): n is a, c, g, or t
  misc_feature (254)..(254): n is a, c, g, or t

SEQ ID NO: 4296 - DNA, 507 bp, Mus musculus
  misc_feature (350)..(350): n is a, c, g, or t
ggaccagtcattattacagatttaaaatatctaacttaagacctttttaaatcaaatttaaagcatagcaaatttaagcacactccgaaacaacatttattttacttcttggttctgataacatctcactgagtggtaaaggtgattaaattagtgttaactcactggggattgtcaatggctattgaccattaaggagcacattgagagccagccaactagatggctcagtggggaaagcatttctggaacagcctgacaacctgaggctagtccctggaaccgatataaatgtggaaagagaacctactccctaagttattctctgatctccatacatgcacacacanatacacataataatagtggttttagttttttgtttgtttcaatgtagatgggcatggtgatgcatgctgttaatctcagcacacaggaagcagaggatcactgagtttgaggtcacctgatctacatatacagcagtgtcaggctagccagaattat

SEQ ID NO: 4297 - DNA, 507 bp, Mus musculus; identical to SEQ ID NO: 4296
  misc_feature (350)..(350): n is a, c, g, or t

SEQ ID NO: 4298 - DNA, 445 bp, Mus musculus
  misc_feature (34)..(34): n is a, c, g, or t
  misc_feature (45)..(45): n is a, c, g, or t
  misc_feature (51)..(51): n is a, c, g, or t
  misc_feature (65)..(66): n is a, c, g, or t
  misc_feature (71)..(72): n is a, c, g, or t
ttcgtgcgctgcagtcagtggtgcaggctgtgcngctgcacgagnttcgcnagcaggcggcgganntacgnntccgcccgctgttctccttgcttaaccagaacaatcggtgagagaagcaccgggcttgggcgggtagggatggctgcaggggtctttcggagaaaagtccaggttgtccaattgcaagatgtccacaactgtgtgttgcccgggtcttgacggttctcctctccggaaggaatcttctgctgatattgtggcggggtccacggcacgccttttaatttcagtatccagtgaatgcttgtccagtggaattaaaatgtacggaataacagatttgtgagacagcaaaactttaaactagaaacaaccatattaataaatcattaaggacataaattattgctgcgtaacgttgcgcggccgatctgtgtatgta

SEQ ID NO: 4299 - DNA, 445 bp, Mus musculus; identical to SEQ ID NO: 4298
  misc_feature (34)..(34): n is a, c, g, or t
  misc_feature (45)..(45): n is a, c, g, or t
  misc_feature (51)..(51): n is a, c, g, or t
  misc_feature (65)..(66): n is a, c, g, or t
  misc_feature (71)..(72): n is a, c, g, or t

SEQ ID NO: 4300 - DNA, 567 bp, Mus musculus
  misc_feature (253)..(253): n is a, c, g, or t
  misc_feature (267)..(268): n is a, c, g, or t
  misc_feature (271)..(271): n is a, c, g, or t
  misc_feature (402)..(402): n is a, c, g, or t
  misc_feature (425)..(425): n is a, c, g, or t
  misc_feature (466)..(467): n is a, c, g, or t
  misc_feature (489)..(489): n is a, c, g, or t
  misc_feature (524)..(524): n is a, c, g, or t
caacttatcaaaaggagtttagcctagttgatcaacagctcaggctgcagcgcctttctgttacagtagcaaagtttcaaacctggtgactttgacaagtgctcctgtttcgggcagaagtatagggtttgggctccatgtctctcctcctttcagccgtttttttccctgccaccctgccacactgagcacatccaaggtccacttgagctgcccccatgtgtctgcactcttcctgaagagaaggcttccngatttcctccctcnnggntcagtgggcaagacggccagtttcaaagccatcaaatgcaagggagaaaaggataaaagggagccatgctgtgctggggtagcaaaggggccaggtcaatcttagaaagattcagtgaagcaaagacttcngggaggggcaagaaaatgtcccncctagaaggaacgctcagaaaagctgacatagcacattctnngcactccgggtaccaaggaggntattgggggcggagagcatgcaaggggaggcccanagatgaagagcgagtggtatggtgaactgtgctggttactggc

SEQ ID NO: 4301 - DNA, 567 bp, Mus musculus; identical to SEQ ID NO: 4300
  misc_feature (253)..(253): n is a, c, g, or t
  misc_feature (267)..(268): n is a, c, g, or t
  misc_feature (271)..(271): n is a, c, g, or t
  misc_feature (402)..(402): n is a, c, g, or t
  misc_feature (425)..(425): n is a, c, g, or t
  misc_feature (466)..(467): n is a, c, g, or t
  misc_feature (489)..(489): n is a, c, g, or t
  misc_feature (524)..(524): n is a, c, g, or t

SEQ ID NO: 4302 - DNA, 383 bp, Mus musculus
  misc_feature (31)..(31): n is a, c, g, or t
  misc_feature (184)..(184): n is a, c, g, or t
  misc_feature (304)..(304): n is a, c, g, or t
atttcacgtggatgggcttcagtgcgcatgnaggccttcgtgtttggctttcacaactagacagaaggttttcaaggtcaactacgctgaagcccaggacgtcctatttctagcggaagaagatttccctgtgtggccgcagcccttctctctcccctcacctctcactatgcagctccgacangcctgaacctcacggcagcctcagcctcctgagtgcttgcatcacaggtacagactaccacaccaacgaacacatactctggctgtacactgtaagcaggcgaactgtaccctgaggganagttatgtaccagggaagccgttgttaaaggtaataatcatatactataaagagactggcagtacaatatgcagtcaag

SEQ ID NO: 4303 - DNA, 383 bp, Mus musculus; identical to SEQ ID NO: 4302
  misc_feature (31)..(31): n is a, c, g, or t
  misc_feature (184)..(184): n is a, c, g, or t
  misc_feature (304)..(304): n is a, c, g, or t

SEQ ID NO: 4304 - DNA, 498 bp, Mus musculus
  misc_feature (131)..(131): n is a, c, g, or t
  misc_feature (189)..(189): n is a, c, g, or t
caacaacaacaaaagcctttggtgaggtttttatttgccctggaagcattcagttgaacttagtaccttcagttcatgtgaggcaactggcctggagacttagctcctctgtttatccacagaacagatanagcacgggcagcggcagtgcaagccacccccagccaccccgtgccactgtgtcccaancctgacctggagggaccagctctcggggtaagagagggattctggcttgctcagtgcgctgcctccctgctgagaggccagcaagggtggtggctgctattcccctgactctcgggcatgaggtctacttactctgccctgtaggccactgtgctgcagagaggccactccaaggccacagcatacagcaggtcctttgtcgctggtcacagtggatgccaggttaggttgctgctggggagggctactgctattagtcagctcagtttctcttctgagtgaaggggtggtctctttgtgtgacagctt

SEQ ID NO: 4305 - DNA, 498 bp, Mus musculus; identical to SEQ ID NO: 4304
  misc_feature (131)..(131): n is a, c, g, or t
  misc_feature (189)..(189): n is a, c, g, or t

SEQ ID NO: 4306 - DNA, 530 bp, Mus musculus
  misc_feature (32)..(32): n is a, c, g, or t
  misc_feature (255)..(255): n is a, c, g, or t
gcatttttaccatttagaaagtcagacattcncagtggtacagtatagaaaatgcataaaggtgtgaaaacccaggggagtactacagacatttttagactggttggatgtcttgtgacgaacggaggagacagggttgggaaggagtagtttgcccaggagactccattccgggcataagcttgcacacacaggggcgtttcaagtctttctttgttccttctttcatctaatgccttgctgtctagtttttcnaggctgcagcatatggagtcagaggagcctatggttggtaccacaggctctggcgtaggagcgcctggtgctcaccctgctggtggctgagctaccgccactaagcccagtcagatagatatacagagactctatggggatgacagtaacgttagcctgtgctacacagcgggcttgtgtcagtagaggcatgtgtttagtgaatgcgtgcgtatgcaagactgcttggctcttactctctaacttgtatttcttacttataatgcagcttgctg

SEQ ID NO: 4307 - DNA, 530 bp, Mus musculus; identical to SEQ ID NO: 4306
  misc_feature (32)..(32): n is a, c, g, or t
  misc_feature (255)..(255): n is a, c, g, or t

SEQ ID NO: 4308 - DNA, 491 bp, Mus musculus
  misc_feature (94)..(97): n is a, c, g, or t
  misc_feature (99)..(100): n is a, c, g, or t
  misc_feature (338)..(338): n is a, c, g, or t
  misc_feature (356)..(356): n is a, c, g, or t
  misc_feature (385)..(385): n is a, c, g, or t
  misc_feature (397)..(397): n is a, c, g, or t
  misc_feature (415)..(415): n is a, c, g, or t
cagttgtatcaggttttgtgcacaaaagaaaagcacaaaagttgaacgcacctgaggcatgtgctctctgtgcaccaaatactcagatgggctnnnntnnacaggcctacagtctgtgtctgtgtccagaagtttttgacttttttgctttgtataatcatagaatctattgctgctgatttctataagaattcaacttgtgtgtctcttcataactgaggactgtcaataacctgtgattttgccttttctatagtcttactcccatgaagaacattggttctgatggagaaagaatgaaaagctttattcccccagatatctttatatttttattntatattttagttgtgtantatgtgctaccaacttttttcagtttgtnacaaacacaatntggtaatttttaaattgnttctgcctgccaccagtcagagacaactgtacttctcttatgggtatagagtactttatatacagaggtcaggaca

SEQ ID NO: 4309 - DNA, 491 bp, Mus musculus; identical to SEQ ID NO: 4308
  misc_feature (94)..(97): n is a, c, g, or t
  misc_feature (99)..(100): n is a, c, g, or t
  misc_feature (338)..(338): n is a, c, g, or t
  misc_feature (356)..(356): n is a, c, g, or t
  misc_feature (385)..(385): n is a, c, g, or t
  misc_feature (397)..(397): n is a, c, g, or t
  misc_feature (415)..(415): n is a, c, g, or t

SEQ ID NO: 4310 - DNA, 154 bp, Mus musculus
tggagaggacctttacccctgtatctcttaagctgtaggatctctctctctcttctcttttgttttatacaggttttgaatttctttaacttttattgtgtgtactgaatactacatatgtattattctgattgtttgctctagtttactacca

SEQ ID NO: 4311 - DNA, 154 bp, Mus musculus; identical to SEQ ID NO: 4310

SEQ ID NO: 4312 - DNA, 300 bp, Mus musculus
  misc_feature (88)..(88): n is a, c, g, or t
  misc_feature (94)..(94): n is a, c, g, or t
  misc_feature (116)..(116): n is a, c, g, or t
acttctgttataaaagcagtgtttggaaataagaaattattaaaaatggtacaaaatactagttaattcccttttcccaccttccacnttttanctttagttagctaaagggtacnaacttgtcattgaaagatttttagaaatgtgtttaattcttttaatacactcagtactaaaatgtctgtatgtcttattaagtgcagtaagttctgttgggtacagagacaagtgtgatcaaagatggagaggacctttacccctgtatctcttaagctgtaggatctctctctctcttctctt

SEQ ID NO: 4313 - DNA, 300 bp, Mus musculus; identical to SEQ ID NO: 4312
  misc_feature (88)..(88): n is a, c, g, or t
  misc_feature (94)..(94): n is a, c, g, or t
  misc_feature (116)..(116): n is a, c, g, or t

SEQ ID NO: 4314 - DNA, 394 bp, Mus musculus
tggatgtgagccaggctcttgtagtgagccagagttgctggatgacttgggacagccgcctgcctccccgctgcctctcttcttcttgaccctggaggccgactgggcagaggctagggctcgctggggtctggcctgggaggcccatgtatatggagcaggagctctcttcggcttggtggctctgctggctctgttagctctggccctcttgccctggcgctgtccgccaggcgccccctgcctggcgttgctggatctgctgctgctctccgcggggaccactcgggccttcccgctcttctacgacgcctacgggcatcgcgatcggctgccgactctcgtctggctactgctgcaggaccttccgctgccctgcctagctgcaggtctg

SEQ ID NO: 4315 - DNA, 394 bp, Mus musculus; identical to SEQ ID NO: 4314

SEQ ID NO: 4316 - DNA, 598 bp, Mus musculus
  misc_feature (133)..(133): n is a, c, g, or t
  misc_feature (178)..(178): n is a, c, g, or t
  misc_feature (245)..(245): n is a, c, g, or t
  misc_feature (255)..(255): n is a, c, g, or t
  misc_feature (270)..(270): n is a, c, g, or t
attaagggccaaagatggctcagcagataaaggcatctgtttaccaagcctgatgttctaagttctatcaccaagacccacactgtaccagagaactgactcctctaactcgactctgagcgccacacacagnccatggcacacactggtccacgtacacacagatacagaaaataangacaaatgtaataaaaataataataaggaaaataaaaatgaggttctccacgtttaattttttttcntcaaatttanaatgaaaatgggaanaaggaggagaggggaacaagcaggtgaacaggtttgtaaccagcgaagtcgttactgttgctaaggaagggtgatcttgtgtaaaatatccttccaacaacagagggaagcgccatcatgacaaggagtagacgaccatgacagagtcagaagggcaggcagggcaggcagacctcagagatcgccgtcacagccctctaagtagatctcctacacacatcctacaacttccttcctaccgagtagtacttttttgtataaaaataatgtctaaactaagaaaggtagaaaccaaaggagcacactcacatctggacagagatattta

SEQ ID NO: 4317 - DNA, 598 bp, Mus musculus; identical to SEQ ID NO: 4316
  misc_feature (133)..(133): n is a, c, g, or t
  misc_feature (178)..(178): n is a, c, g, or t
  misc_feature (245)..(245): n is a, c, g, or t
  misc_feature (255)..(255): n is a, c, g, or t
  misc_feature (270)..(270): n is a, c, g, or t

SEQ ID NO: 4318 - DNA, 386 bp, Mus musculus
  misc_feature (27)..(27): n is a, c, g, or t
cactttgctgctaccgtctgtactgtntacatcacggttcccttagcttgctcctggtagtgcattacaggcaagcatgaaatgtaaagtatttatttaaataaaaaggaaacctctgaattggtcatcgagtcacctccctgtagatttgtagtctgtgacatatttcgactttctagtcctgctagatccatataagatctggtcatctggttaagggtttgaagcagacatagctatgaacccggatggtatcatcactgtcacggctggccacactacagatgtttatgtccttacgtttatgacccacagggtgtgaagtaacttccaagaacctgattttgtacactgtccactctcagtatctcacactctctgatagg

SEQ ID NO: 4319 - DNA, 386 bp, Mus musculus; identical to SEQ ID NO: 4318
  misc_feature (27)..(27): n is a, c, g, or t

SEQ ID NO: 4320 - DNA, 402 bp, Mus musculus
  misc_feature (28)..(28): n is a, c, g, or t
cactgaacctgatgcccatatctgcccngagtagagctataggataacgactcacagtctagtttgctaagacacggtgtgtctcgtttcagagggcttattgggcaacttccctgacaatgaatgccttttttgaagaccacaggttgcaaagataagttagggacatctgtctgttttcgggaagtgaggacagtgaccccatatgggaatcagaacatggcattgctccttagagatacattccatccctgtcaaggtcatctctgtatacgagacagaggttggcttctccctagcagtggggagtggggagtggtgtgttcttctgagactctgtaacatctacctcatgagggtttcctgggaaacagtgagatgatgttctgtgctctgttagac

SEQ ID NO: 4321 - DNA, 402 bp, Mus musculus; identical to SEQ ID NO: 4320
  misc_feature (28)..(28): n is a, c, g, or t

SEQ ID NO: 4322 - DNA, 357 bp, Mus musculus
  misc_feature (125)..(125): n is a, c, g, or t
ttgtcaccacagtcgttgtccccatcacagtcccacagactccgaatgcagtagcctttttggcaggggaattggtcctcctcacactcccgggggggacagtcctgctcatcagagtcatcttnacagtcattgtccccgtcacacacccaggagcgtcggatgcacttgccgttgtcacagtggaagtccagaggggagcaggtaggcagcgtacagccatcctcatcgctgtggtctccacagtcattgtctccatcacactgccactgggcggggatacaggtacattcgccaagcgcgctcaccgcacatgtgaagtggctccgaccacatgcacactccagactgctggct

SEQ ID NO: 4323 - DNA, 357 bp, Mus musculus; identical to SEQ ID NO: 4322
  misc_feature (125)..(125): n is a, c, g, or t

SEQ ID NO: 4324 - DNA, 583 bp, Mus musculus
  misc_feature (239)..(239): n is a, c, g, or t
  misc_feature (243)..(243): n is a, c, g, or t
  misc_feature (249)..(249): n is a, c, g, or t
  misc_feature (278)..(278): n is a, c, g, or t
  misc_feature (306)..(306): n is a, c, g, or t
acatcgacctgaagaaccgcgcggggggacgccttcgcccttcgttgagttcgaggacccacggtgaggcagcgtggggcgtgcgcggccttgagaagatagcgtggaggagttggggaaggctcggaggccttggaacataatggggggagaggaggggctcagaggcgctatcgcccctgcaggagtcgagtcaggagagccgagagccggcgcgttgtatccggtggccgtccgcntcgnacgtcncccctaccccccgagcccatgcgcagccnccggagcgggaaaccgaggcgctgaggnccggcgaggtggtcgggagcctctgcccggcgtggtgctgggtgggggaagggccggccctattatgcggcgcatgtggggctccgtgtggccccgtgggtgcgcatgtgcgctgtggccgcggcttttcacccccggagcgggcgaacgagctgggtccggcggctccctcccctcatcacccccccctttcgctttctgtgatcacacgcagagacgcggaagatgcggtgtacggtcgcgacggctacgactacgacggctaccggctgcgggt

SEQ ID NO: 4325 - DNA, 583 bp, Mus musculus; identical to SEQ ID NO: 4324
  misc_feature (239)..(239): n is a, c, g, or t
  misc_feature (243)..(243): n is a, c, g, or t
  misc_feature (249)..(249): n is a, c, g, or t
  misc_feature (278)..(278): n is a, c, g, or t
  misc_feature (306)..(306): n is a, c, g, or t

SEQ ID NO: 4326 - DNA, 321 bp, Mus musculus
cagtcctacttgaagcagttttttaattcttcaataattgatgtactaaaccaaaggaacaagaaaagcatttttccatattccatctctctcccaaactcgtgcagcattttggactaccgtgctgtcatcgagaagctccccgaggacgataagcccagcttcttcggtctgcccgccaacattgcccgctcctctcagcgcatgatcagctctcaggtcatctcccagctcaggatcttgggaagatcggtcacagccggttgcaaatttgacagagaaatctggtctaatgaactttctccagttctgaatctttgg

SEQ ID NO: 4327 - DNA, 321 bp, Mus musculus; identical to SEQ ID NO: 4326

SEQ ID NO: 4328 - DNA, 411 bp, Mus musculus
ttggcagctccacctcgcaagtcaagacgtgcgtttcctgtgcatttggagcaatcgggcctccgggtccagaaagggcgggctctgtggggccggcagcgcagcaccgggacgcccggacgagcccggcaccaggcctagggcgagcggagtggccgaggaaggaacggaccgcggaaggcgctggctgccgaccctgcccggcgttcatcccgcgagtgactgcctggaggccccgcttcccctttctcagggtggggacgcgcgggaggcgggcccggtgcgcaggacggctggaaagcggcagcaggaaaaggttcataatggagcctttcatcgccagccggtggccaggtgccaggaccgactccgcggaggccagcatgctggtgtaggcctgccctgcgctct

SEQ ID NO: 4329 - DNA, 411 bp, Mus musculus; identical to SEQ ID NO: 4328

SEQ ID NO: 4330 - DNA, 341 bp, Mus musculus
  misc_feature (70)..(70): n is a, c, g, or t
  misc_feature (74)..(74): n is a, c, g, or t
  misc_feature (79)..(79): n is a, c, g, or t
  misc_feature (120)..(120): n is a, c, g, or t
  misc_feature (316)..(316): n is a, c, g, or t
gttttgtccacagatgattaaatcatcagagtatttacctaggcaatggttcaacccactgatggtttcnaaantttanattgactgctgtatagtaggaactgtacaaagtagcccctntaagtcactggaaactttattgtccaggtcccttccggttatggtcctctctgcatcctggctaccacatcctaacagctgtgctccatctcctatagccatcataaggttcagcagcaacatgagcccagaatcaacatcctatacagtgaaacctctgaaatcatcagccaaaataaatctttctcccttcagntgcctctctcaggaatttgatcaca

SEQ ID NO: 4331 - DNA, 341 bp, Mus musculus; identical to SEQ ID NO: 4330
  misc_feature (70)..(70): n is a, c, g, or t
  misc_feature (74)..(74): n is a, c, g, or t
  misc_feature (79)..(79): n is a, c, g, or t
  misc_feature (120)..(120): n is a, c, g, or t
  misc_feature (316)..(316): n is a, c, g, or t

SEQ ID NO: 4332 - DNA, 349 bp, Mus musculus
  misc_feature (55)..(69): n is a, c, g, or t
  misc_feature (139)..(153): n is a, c, g, or t
  misc_feature (186)..(186): n is a, c, g, or t
  misc_feature (214)..(214): n is a, c, g, or t
  misc_feature (283)..(316): n is a, c, g, or t
atggtcatttagtcaagtgtcctgtaagatcagctcctccctcagaataaagttnnnnnnnnnnnnnnngtcgcccagtatgtgaaaggagatatgagaggagacaaatgagttgatggtctaaattataagatttgtnnnnnnnnnnnnnnntgccagtttgccaaatctgatactgtgaaaaantttgatagcttttctaatgtctgactantaaattttaaaatgtcattcttttacaaatcataattagtacttttggttattaccgtcttcagtgttnnnnnnnnnnnnnnnnnnnnnnnnnnnnnnnnnngtaagatctgaacatcagtttgcagacaaaatt

SEQ ID NO: 4333 - DNA, 349 bp, Mus musculus; identical to SEQ ID NO: 4332
  misc_feature (55)..(69): n is a, c, g, or t
  misc_feature (139)..(153): n is a, c, g, or t
  misc_feature (186)..(186): n is a, c, g, or t
  misc_feature (214)..(214): n is a, c, g, or t
  misc_feature (283)..(316): n is a, c, g, or t

SEQ ID NO: 4334 - DNA, 277 bp, Mus musculus
  misc_feature (94)..(119): n is a, c, g, or t
  misc_feature (122)..(144): n is a, c, g, or t
  misc_feature (182)..(182): n is a, c, g, or t
  misc_feature (184)..(184): n is a, c, g, or t
gttttgtgtgtgagcagtctcctccctgttttgttcccaagtatgcatgtgcctgttccgagtctctagaaaccttttttataaaaagagatcnnnnnnnnnnnnnnnnnnnnnnnnnnccnnnnnnnnnnnnnnnnnnnnnnntgagaacgtggttcctgactcgactggaaggctaaaancnggaataaaagattaaagagggtattcatgatgtctttgagaaaaatcagaatatcatgtagggcgacctagtttccagaccagtaggcagtat

SEQ ID NO: 4335 - DNA, 277 bp, Mus musculus; identical to SEQ ID NO: 4334
  misc_feature (94)..(119): n is a, c, g, or t
  misc_feature (122)..(144): n is a, c, g, or t
  misc_feature (182)..(182): n is a, c, g, or t
  misc_feature (184)..(184): n is a, c, g, or t

SEQ ID NO: 4336 - DNA, 411 bp, Mus musculus
gcctgtaggatttcaacttgagtttcttgtcccctgctcatgttaggacaatggttgaccagttaatctacctctgtcactgtcaacaaaatctagcttttatgatagattttgttctgtctctaaagcttaatatttgtattacactttagaaaatgtatcaccctgcacagactcttttgcagggtgtgtcagtcattaagtctagactgtgttgtattgagttgctcgtgcccagaagttagctgatgcagatgtccagtgcaactgaccagaagggtgctgtccctcaccgctcagttacttggaatgcttcctggggctgacctaaatgtggctctggaatggaagtttctggttgaataggtgtttgttgttgaataggtgtttgtcaggggtctgaaaacacct

SEQ ID NO: 4337 - DNA, 411 bp, Mus musculus; identical to SEQ ID NO: 4336

SEQ ID NO: 4338 - DNA, 110 bp, Mus musculus
taagggacctcaagttcttagaaagatgcaccgtgggtgggtggggacaggaaccttcaggtcctctgctggtgcaggcaaggaatgtctcttaccgagcagcaacgtag

SEQ ID NO: 4339 - DNA, 110 bp, Mus musculus; identical to SEQ ID NO: 4338

SEQ ID NO: 4340 - DNA, 219 bp, Mus musculus
cgtagagggttctgttcatgatcatgatcatctggatgtccagcctgtgcctctgcgtggtgttccgtcctggcttgtggcccacaaacaccggatactgttttgtatagttgccatgcgaaatactgattggctcggaatcttctgggaaaccagccccagcgcagtgtagcagtgtgagacacagcagtaaggctgctggccgcatagtaggttcag

SEQ ID NO: 4341 - DNA, 219 bp, Mus musculus; identical to SEQ ID NO: 4340

SEQ ID NO: 4342 - DNA, 57 bp, Mus musculus
aaaggagctcttgagctctagaggccttgtaacatcccaggctgtaattctcaggca

SEQ ID NO: 4343 - DNA, 57 bp, Mus musculus; identical to SEQ ID NO: 4342

SEQ ID NO: 4344 - DNA, 362 bp, Mus musculus
  misc_feature (44)..(44): n is a, c, g, or t
  misc_feature (109)..(109): n is a, c, g, or t
  misc_feature (335)..(335): n is a, c, g, or t
aacgccagcactgagactggcccatgaaggagcatgaagacccnccttccttccttctcccctggacagcagcctggcaccccgaagcccagagtgccaccacctgtgntgctcaggagcccagtgcacacctagaaagaggactcagacacagcgggcagaggctcctgatggacctgtgaggaaagcccggtggcaggcaggtggcccccccagccctctggtgaccactgtatctgagctctttttgggaaggcttatagacagcaggtggaccccatatgctgggcatagggagcctgggaagggctcaggagctcaggaccactccaggntctctggcaccattgcttaagattcag

SEQ ID NO: 4345 - DNA, 272 bp, Mus musculus
  misc_feature (116)..(130): n is a, c, g, or t
ctggttcctgttctgtactcacctaggttgaactttagccaaacttctgacttcataaagcatcttactgtagaaggtcaggaggtcacacggctggggctgaaacggaacactgnnnnnnnnnnnnnnntgtgtaagttagtgtctcagtgaccagtacaggcttcccagctgactccacattttaatttgtacgatgaaagggttttgtcctagctaaaaaagttagccaggtgtggtggcacatacttgtagtcccagggctcagcagg

SEQ ID NO: 4346 - DNA, 272 bp, Mus musculus; identical to SEQ ID NO: 4345
  misc_feature (116)..(130): n is a, c, g, or t

SEQ ID NO: 4347 - DNA, 512 bp, Mus musculus
  misc_feature (26)..(26): n is a, c, g, or t
  misc_feature (35)..(35): n is a, c, g, or t
  misc_feature (446)..(446): n is a, c, g, or t
  misc_feature (449)..(449): n is a, c, g, or t
gcctggccgactttccttctgtaaantcctccttntcggctttcttaaaagtcctgtacatatttgcaattacattgtgcacagattcttaatggatagatttcttttgtcaggctacaacaacagactgcagattccttgtttgtattgtaaatgattgaatacattttgttaatatgtttttattcctatgttttgctattaaaatttttataacatttccaagacaaaaattccaagtttctgctttgaagaatttaggtaattaaattaccctaagctgatctcttagtttaggagttatttgggttttgacactggagttgtgccaggtgaacatcagaaacaagatgcttaaatcattacactaacttgtattggttgcgggattgggtttggggtcgtttggtcttattttagggttttttttttttttgttttttttnttnttcaaatttaaaagccttaaatgtactgtaagcctcagatcgttgtacaactggattgcgttg

SEQ ID NO: 4348 - DNA, 512 bp, Mus musculus; identical to SEQ ID NO: 4347
  misc_feature (26)..(26): n is a, c, g, or t
  misc_feature (35)..(35): n is a, c, g, or t
  misc_feature (446)..(446): n is a, c, g, or t
  misc_feature (449)..(449): n is a, c, g, or t

SEQ ID NO: 4349 - DNA, 393 bp, Mus musculus
  misc_feature (308)..(322): n is a, c, g, or t
  misc_feature (326)..(341): n is a, c, g, or t
cattcaagtcagaaacagtcaaaagagaaaaatatttatttttatcttttttggtgtcttttcaaaaaattgaaaggtaaaactacattaaaaccttaagttaaatgtacatgttaggactcagcaatttcacatttagattttatactgtattcattttgtttgcgttttgagtgtgtaataccgcattagcaatatggttccaatagaagttcgatatatattattaaaggagacctgtagcagtcagagattttattgatttaatgacaaataaaggaaattaattaattttttttcctgctgtnnnnnnnnnnnnnnntcannnnnnnnnnnnnnnnctagagtttggaatgcaaaattaaatgtttcaacctcaagctgggaatattt

SEQ ID NO: 4350 - DNA, 393 bp, Mus musculus; identical to SEQ ID NO: 4349
  misc_feature (308)..(322): n is a, c, g, or t
  misc_feature (326)..(341): n is a, c, g, or t

SEQ ID NO: 4351 - DNA, 346 bp, Mus musculus
  misc_feature (121)..(121): n is a, c, g, or t
  misc_feature (269)..(269): n is a, c, g, or t
  misc_feature (298)..(298): n is a, c, g, or t
  misc_feature (312)..(312): n is a, c, g, or t
  misc_feature (319)..(319): n is a, c, g, or t
  misc_feature (321)..(321): n is a, c, g, or t
acctcttcccgaagaggaactcagcgagccctttggagggtggtttgcctaatcagtgggttagaaggaatgcaattaggtcgtcacgtcattcgtggagatgagtcttagggcgcatgcnactctccccgctgctgcttcaaacacaaagacagccatcagaagccgcccgggaggcttgctgccacaggggcacctgggtgatactctgacactgtccccacagtagaaggcaaatcatctcctagtcttgccgtctgtataccttntttggggttttcatccctggcttattttntggctttgaaagantgaattntnttgtgaaactgtgattcccgtggct

SEQ ID NO: 4352 - DNA, 346 bp, Mus musculus; identical to SEQ ID NO: 4351
  misc_feature (121)..(121): n is a, c, g, or t
  misc_feature (269)..(269): n is a, c, g, or t
  misc_feature (298)..(298): n is a, c, g, or t
  misc_feature (312)..(312): n is a, c, g, or t
  misc_feature (319)..(319): n is a, c, g, or t
  misc_feature (321)..(321): n is a, c, g, or t

SEQ ID NO: 4353 - DNA, 392 bp, Mus musculus
  misc_feature (89)..(89): n is a, c, g, or t
cttcagcttccgtccgtggaactcactctcgtggagctctatccgcgctcttgccgcagcctcgggcttgctgaagttgatcctcactntgcgaaagctcttgaacaactggaatgtgacctggtcatcgtagagggtgaacagggcctcaaacctctccttttgctcttggacctcaaacactgcttcatggacactgcaagcaaagagtgaggtgggcaggtcacttaggtccatcatctcttccagtccgtcctcattttcaccgaagaccatctcctcttcctcctcctggtcgctgctacagaggtctgactggctgtcattccaagatttcaggctgtctcggagcatcttctctgtaaagttctaggatgcctgccagatacttc

SEQ ID NO: 4354 - DNA, 392 bp, Mus musculus; identical to SEQ ID NO: 4353
  misc_feature (89)..(89): n is a, c, g, or t

SEQ ID NO: 4355 - DNA, 232 bp, Mus musculus
  misc_feature (116)..(116): n is a, c, g, or t
  misc_feature (142)..(142): n is a, c, g, or t
  misc_feature (146)..(148): n is a, c, g, or t
ctgaccagcaagagcctgagaggagagcgtcattcctggggaggagcagcgtgtgtgagcaggcacggtatgagctcacactgactgacagacgcgtgcttgttctgctggcgcantgtggcctggagatgtggctgggccngtgnnnagagatggggtcattcagtcttcctcccctgtgagattgtatctaaagtccggtgttgccagcttcagttggttcctgtgactg

SEQ ID NO: 4356 - DNA, 232 bp, Mus musculus; identical to SEQ ID NO: 4355
  misc_feature (116)..(116): n is a, c, g, or t
  misc_feature (142)..(142): n is a, c, g, or t
  misc_feature (146)..(148): n is a, c, g, or t

SEQ ID NO: 4357 - DNA, 481 bp, Mus musculus
  misc_feature (160)..(166): n is a, c, g, or t
  misc_feature (168)..(174): n is a, c, g, or t
  misc_feature (179)..(181): n is a, c, g, or t
  misc_feature (184)..(184): n is a, c, g, or t
  misc_feature (192)..(192): n is a, c, g, or t
  misc_feature (194)..(194): n is a, c, g, or t
  misc_feature (393)..(393): n is a, c, g, or t
  misc_feature (405)..(405): n is a, c, g, or t
  misc_feature (407)..(407): n is a, c, g, or t
  misc_feature (425)..(425): n is a, c, g, or t
  misc_feature (456)..(456): n is a, c, g, or t
gtaagcattcataccatcactgagctacaatccctggttatcagcttctcactttatttaccttcccctgactttgacagccctgtctagtttggaacttattatgtaatccacgatggccttgaatttacagccatcctcagcctctccagtgctaggnnnnnnnannnnnnngactnnnttntttttttnantttgttcaggtttttaatgagtgtcttggtttcagatatgaaaaacagaatttggaagaaagccagttgggccagtctgtggtagagcatgcactcaaagttgaagcaagatgttaatgagttctaggctggcttaggcttcatagcaagatcctatctcataaaacaaaaagttaactggtgattccctggaggtganaggggtgaggananagtgatagttaatgaatncaaagttctttgagggaaaatgagaatattntgaaattggctatggcgatactcat

SEQ ID NO: 4358 - DNA, 481 bp, Mus musculus; identical to SEQ ID NO: 4357
  misc_feature (160)..(166): n is a, c, g, or t
  misc_feature (168)..(174): n is a, c, g, or t
  misc_feature (179)..(181): n is a, c, g, or t
  misc_feature (184)..(184): n is a, c, g, or t
  misc_feature (192)..(192): n is a, c, g, or t
  misc_feature (194)..(194): n is a, c, g, or t
  misc_feature (393)..(393): n is a, c, g, or t
  misc_feature (405)..(405): n is a, c, g, or t
  misc_feature (407)..(407): n is a, c, g, or t
  misc_feature (425)..(425): n is a, c, g, or t
  misc_feature (456)..(456): n is a, c, g, or t

SEQ ID NO: 4359 - DNA, 180 bp, Mus musculus
agttattaagtcattccttagatgccttttcagcctcttaactgagtaggttcttcttggaagatcttaaaaagaaaatgatgattaagaattaaagtctctccagtcactggtggcatatgcctttaatcccagcacttgggaggcagaggcaggtagatttctgatttctagaacagc

SEQ ID NO: 4360 - DNA, 180 bp, Mus musculus; identical to SEQ ID NO: 4359

SEQ ID NO: 4361 - DNA, 180 bp, Mus musculus; identical to SEQ ID NO: 4359

SEQ ID NO: 4362 - DNA, 429 bp, Mus musculus
  misc_feature (28)..(28): n is a, c, g, or t
  misc_feature (33)..(33): n is a, c, g, or t
atggatgctggtttatcattcatcatgnccaanccatgcaaaagtgaaagaaaatgatcttgtctttgacccctttgttggaacaggtggcctccttatagcatctgctcactttggtgcatatgtgtgtgggacagacatagactacaatacagttcatggcttgggaaaggctagtagaaaaaaccagaaatggcgtggaccagatgaaaacatcagggcaaatcttcgtcagtatggcttagagaagttttaccttgatgtcttggtttcagatgcgtctaagccttcctggaggaagggaacatattttgatgcaatcatcacagatcctccatatggtatcagagaatctacaagaagatcaggttcacagaaggacataccaaagggaatagaaaaatgtccagaaagccacgttcctgtttc

SEQ ID NO: 4363 - DNA, 429 bp, Mus musculus; identical to SEQ ID NO: 4362
  misc_feature (28)..(28): n is a, c, g, or t
  misc_feature (33)..(33): n is a, c, g, or t

SEQ ID NO: 4364 - DNA, 329 bp, Mus musculus
  misc_feature (233)..(233): n is a, c, g, or t
ctcccaggcctggtggagacgctgtggaccgccccttccagtgtgcctgctgcggcaagcgtttccgccacaagcccaatctgatcgcccaccgccgcgtgcacactggtgagcgaccacaccagtgcccagagtgcgggaagcgtttcaccaacaagccctacctgacctcgcaccggcgcatacataccggcgagaagccctacccatgcaccgagtgtggccgccgcttncgccacaaacccaacctgttgtcgcacagcaaaatccacaagcgcttggaggtctcagcgcaggctgccccacaccccgagagtcaccagattgca

SEQ ID NO: 4365 - DNA, 329 bp, Mus musculus; identical to SEQ ID NO: 4364
  misc_feature (233)..(233): n is a, c, g, or t

SEQ ID NO: 4366 - DNA, 414 bp, Mus musculus
acatggggaccctcagccagatggacacttgccacctgttaccactgcccaagccatattggacacagctgagcaggaggctgagatcccatgaaatccccaaacccagtgtcacctggggacctgagccgttgtgcccctctctgctgccactccaaaccagaagaccctgggaggcactggcagggacctgggcctctcaccctgtgacactcttaactgcgttgactctgattgcattgccaccctttgtctgtgtgtgcgccttctgtaacccctccccgtgggtgtcagctcaccctgtccctagccagctgccttgtctgcctcttcctggctgcctctaagcttcctgggcctccctgtcttcataccccatctccactgccccttgcctggggattcccagtgtgg

SEQ ID NO: 4367 - DNA, 414 bp, Mus musculus; identical to SEQ ID NO: 4366

SEQ ID NO: 4368 - DNA, 427 bp, Mus musculus
gggtcatttctatcagccttcaatgaactgtgctaccagaaaattatggccatttcctacagggagagaggtcatggctcattcctatctgtgtaacttttatctgctaggtaaattaaccctgtttttaattagaaatttgtagctctaagagactaggaggcattttttatttaagctagttagcactctgtgtccatagttaatgcaaaagcaaaaacaggcataaagctctccgggtgagaggaagcatgctctttcaaatgtgactgtgaccctgaatctggtgccacactgaagacttctgggctccgtgtgtgggagctgtcccccgactttgtctggccttgtgatcctgatgaaaagaaaaccaaacaaaaatcagtgggcttctttctctttctgttcatgatcttgtgtgtctccc

SEQ ID NO: 4369 - DNA, 427 bp, Mus musculus; identical to SEQ ID NO: 4368

SEQ ID NO: 4370 - DNA, 530 bp, Mus musculus
  misc_feature (65)..(65): n is a, c, g, or t
  misc_feature (223)..(224): n is a, c, g, or t
  misc_feature (321)..(355): n is a, c, g, or t
  misc_feature (359)..(359): n is a, c, g, or t
  misc_feature (375)..(375): n is a, c, g, or t
  misc_feature (377)..(377): n is a, c, g, or t
  misc_feature (470)..(470): n is a, c, g, or t
  misc_feature (486)..(486): n is a, c, g, or t
tagccctgctctggacatgggtggattgtctccagaggctgagcagggccctgagctggtaacancactctacaggggcagggtggcctcacctgcagactgagcagctgatggagcctcgaagccatctccctccctccacactcatcaaggaccaatcatggggcaggtgctcatttcctggctggggcagagcaggtgaaagcaagagacttcagcggannaggcagcctgcaactccaataaaggccttatttttcttgtataaactgtcttacatttatttgtaactgttgtaagagtggacctagttctccactnnnnnnnnnnnnnnnnnnnnnnnnnnnnnnnnnnngaantaagaagccacagggntnaggcacacatgtgcgtatttattgtgtagctgatgtgggagaggcttttatatttgctttctgcttttaattcatctggacagttggttgttntgtttttctgttaatngtttgtgaccctcccgattatataacagtctgtgcagtcaactt

SEQ ID NO: 4371 - DNA, 530 bp, Mus musculus; identical to SEQ ID NO: 4370
  misc_feature (65)..(65): n is a, c, g, or t
  misc_feature (223)..(224): n is a, c, g, or t
  misc_feature (321)..(355): n is a, c, g, or t
  misc_feature (359)..(359): n is a, c, g, or t
  misc_feature (375)..(375): n is a, c, g, or t
  misc_feature (377)..(377): n is a, c, g, or t
  misc_feature (470)..(470): n is a, c, g, or t
  misc_feature (486)..(486): n is a, c, g, or t

SEQ ID NO: 4372 - DNA, 185 bp, Mus musculus
  misc_feature (143)..(143): n is a, c, g, or t
agaatcattggaggttgtcaactcaattttacagaagacattataaacaagccatcgtgagaagacttcccccaggggtacacctgggtcaggcactgtccattttgaggaaagactctttcttatttataaaacagtcttgntcctggaacttttcccttttcccaacagacgatcttcagacg

SEQ ID NO: 4373 - DNA, 185 bp, Mus musculus; identical to SEQ ID NO: 4372
  misc_feature (143)..(143): n is a, c, g, or t

SEQ ID NO: 4374 - DNA, 474 bp, Mus musculus
  misc_feature (87)..(87): n is a, c, g, or t
  misc_feature (96)..(96): n is a, c, g, or t
  misc_feature (322)..(322): n is a, c, g, or t
ctctggttcttgatagggacaaaagggcaggtttgacttaaccctttgctgtctacacagttgggttcctgttctgggtgctactgncaaatgttntggtacttaagtgtcgagacgcccagcctcaccaccgacttagcactgcagcagcctgtactctgcaactggccatagacgagccaccaggcttctagagtcgtctcagcaccctctcaaggtcacctgactggagcactgccgacgacgtgctcttggtcacatccctgtatagttctctgggaaagctataaatatatatattttggttattgttttgtgtttnccgttacattttatatcttgtatttatcgcccgatatgttttgtacttttgttttcctaaaacaaagaaatccatgtgtgtgtatatagagacttgcatgctagactgtagtcaatgttcagttccttgaaaagtcttgctgctgtcgggtg

SEQ ID NO: 4375 - DNA, 474 bp, Mus musculus; identical to SEQ ID NO: 4374
  misc_feature (87)..(87): n is a, c, g, or t
  misc_feature (96)..(96): n is a, c, g, or t
  misc_feature (322)..(322): n is a, c, g, or t

SEQ ID NO: 4376 - DNA, 564 bp, Mus musculus
  misc_feature (26)..(45): n is a, c, g, or t
  misc_feature (58)..(59): n is a, c, g, or t
  misc_feature (67)..(67): n is a, c, g, or t
  misc_feature (72)..(72): n is a, c, g, or t
  misc_feature (83)..(83): n is a, c, g, or t
  misc_feature (99)..(101): n is a, c, g, or t
  misc_feature (116)..(116): n is a, c, g, or t
  misc_feature (126)..(126): n is a, c, g, or t
  misc_feature (229)..(229): n is a, c, g, or t
  misc_feature (334)..(335): n is a, c, g, or t
  misc_feature (340)..(340): n is a, c, g, or t
  misc_feature (342)..(343): n is a, c, g, or t
  misc_feature (457)..(457): n is a, c, g, or t
  misc_feature (473)..(473): n is a, c, g, or t
acacagatttctttggggtcccagannnnnnnnnnnnnnnnnnnngagttccacaganntctgggcnacctnctttgcaaagnccatgtttgcacggtnnngggaggggcaggggnagggcgtggnaatgggaattctgtgtctttgtgtgaaaactccgatggggggggcagtaagggagacaaccccgactcttatccagtcccccttctctgggttcctgggcggntccccttccctccatcttgacccccacgtccttcccgttccataattgtctgttcacccgctcttgggggggccttccccgtctctcctccaggccccccggggnnggggnanngagtttggaggggatgtgtggttctctatggttttatatataatatattaaaaaatcaaaaatctgtatgaaaatatcagattgcacccctctccccccattactggcttttgnccctttttcttgtttnaaaaaaaaaatgaaacacatttttgtacggggcggggaggggatagggagggggtttggcaatcccactaaccaccattaaactgaggaga

SEQ ID NO: 4377 - DNA, 564 bp, Mus musculus; identical to SEQ ID NO: 4376
  misc_feature (26)..(45): n is a, c, g, or t
  misc_feature (58)..(59): n is a, c, g, or t
  misc_feature (67)..(67): n is a, c, g, or t
  misc_feature (72)..(72): n is a, c, g, or t
  misc_feature (83)..(83): n is a, c, g, or t
  misc_feature (99)..(101): n is a, c, g, or t
  misc_feature (116)..(116): n is a, c, g, or t
  misc_feature (126)..(126): n is a, c, g, or t
  misc_feature (229)..(229): n is a, c, g, or t
  misc_feature (334)..(335): n is a, c, g, or t
  misc_feature (340)..(340): n is a, c, g, or t
  misc_feature (342)..(343): n is a, c, g, or t
  misc_feature (457)..(457): n is a, c, g, or t
  misc_feature (473)..(473): n is a, c, g, or t

SEQ ID NO: 4378 - DNA, 433 bp, Mus musculus
  misc_feature (102)..(102): n is a, c, g, or t
  misc_feature (207)..(208): n is a, c, g, or t
  misc_feature (213)..(213): n is a, c, g, or t
  misc_feature (215)..(216): n is a, c, g, or t
  misc_feature (330)..(330): n is a, c, g, or t
  misc_feature (346)..(346): n is a, c, g, or t
atgggaattctgtgtctttgtgtgaaaactccgatggggggggcagtaagggagacaaccccgactcttatccagtcccccttctctgggttcctgggcggntccccttccctccatcttgacccccacgtccttcccgttccataattgtctgttcacccgctcttgggggggccttccccgtctctcctccaggccccccggggnnggggnanngagtttggaggggatgtgtggttctctatggttttatatataatatattaaaaaatcaaaaatctgtatgaaaatatcagattgcacccctctccccccattactggcttttgnccctttttcttgtttnaaaaaaaaaatgaaacacatttttgtacggggcggggaggggatagggagggggtttggcaatcccactaaccaccattaaactgag

SEQ ID NO: 4379 - DNA, 433 bp, Mus musculus; identical to SEQ ID NO: 4378
  misc_feature (102)..(102): n is a, c, g, or t
  misc_feature (207)..(208): n is a, c, g, or t
  misc_feature (213)..(213): n is a, c, g, or t
  misc_feature (215)..(216): n is a, c, g, or t
  misc_feature (330)..(330): n is a, c, g, or t
  misc_feature (346)..(346): n is a, c, g, or t

SEQ ID NO: 4380 - DNA, 320 bp, Mus musculus
  misc_feature (112)..(112): n is a, c, g, or t
  misc_feature (145)..(145): n is a, c, g, or t
  misc_feature (152)..(152): n is a, c, g, or t
  misc_feature (180)..(180): n is a, c, g, or t
  misc_feature (275)..(275): n is a, c, g, or t
ttcggcagggaggatcagttccttagctccctgccttaacctaggaccaacctgggacctgacctgtgaggactctgtgctgaccttattcttggggaagggaacagatttngacctagatcaagtgtaacttaggtcctcaccnttgggangaccttgccttttctgccttgaggggcnagttttgggagatgaaagggattagtgtggacccagtctaggcaccccagtacttcccttcaccttgtagaaaatggtaatgaaagggcatgccnaggctctttagcagcccagggaaacagagaagtctcccttaaagg

SEQ ID NO: 4381 - DNA, 320 bp, Mus musculus; identical to SEQ ID NO: 4380
  misc_feature (112)..(112): n is a, c, g, or t
  misc_feature (145)..(145): n is a, c, g, or t
  misc_feature (152)..(152): n is a, c, g, or t
  misc_feature (180)..(180): n is a, c, g, or t
  misc_feature (275)..(275): n is a, c, g, or t

SEQ ID NO: 4382 - DNA, 534 bp, Mus musculus
taagggcaccatggttctgatcaatttgactgatctgcatagggaccccaaagagtgggacactccaaatgtcttcaatccagagcactttttagagaatgggcagtttaagaagaaagaatcctttctgcctttctcaatgggaaagagagcttgccctggggaacaattggccagttgtgaactgttcattttcttcactgctcttatgcaaaaatttacattcaagtccccaatcaatgagaagccgagcctgaagttcagaatgggcctaacacttgccccagtcagctaccggatctgtgcggtccctagattgtgatgctggagcaaaaaggaagaaaaagaacaagaagaattggagtatgccctgaagattcttggccttgctcacataaaaggagaaaggcataacagaatgaaggagattcaagaaatactgaagaaattaggctaagaaattgaatcaaatatctggattcctggtgcctaaatttggcagtgagaaaaatcagttatgatctcaatggcata

SEQ ID NO: 4383 - DNA, 534 bp, Mus musculus; identical to SEQ ID NO: 4382

SEQ ID NO: 4384 - DNA, 226 bp, Mus musculus
  misc_feature (104)..(104): n is a, c, g, or t
tattggctcaggagcgaaagctctgtcgggatctagtccatagcaacaaaaaggagcaggagttccgttccattttccagcacatacagtcggctcagtctcangcgtagcccctcagaactgtttgctcagcacatagtgaccattgttcatcatgttaaagagcatcactttggatcctctggaatgacattgcatgaacgctttactaaatacctaaagagag

SEQ ID NO: 4385 - DNA, 226 bp, Mus musculus; identical to SEQ ID NO: 4384
  misc_feature (104)..(104): n is a, c, g, or t

SEQ ID NO: 4386 - DNA, 286 bp, Mus musculus
  misc_feature (55)..(55): n is a, c, g, or t
  misc_feature (161)..(175): n is a, c, g, or t
actcgcgcgacacgatcgggtcgctgagccccctcgatcctcagggcgcgaagcnctggcctaggccccgcggagatgtccagttgcggcgcttgtacctgcggcgctgcggccgcccggcttctcaccacttcgctcacctccgcgcagagaggtatttnnnnnnnnnnnnnnnatgtgccagtgttaggaagactggggacgaccttggacgctcaggctctgcgcagagctcctcttagaaccttttcagaaacaccagcatactttgcctcaaaagacgggg

SEQ ID NO: 4387 - DNA, 286 bp, Mus musculus; identical to SEQ ID NO: 4386
  misc_feature (55)..(55): n is a, c, g, or t
  misc_feature (161)..(175): n is a, c, g, or t

SEQ ID NO: 4388 - DNA, 400 bp, Mus musculus
  misc_feature (298)..(298): n is a, c, g, or t
  misc_feature (311)..(311): n is a, c, g, or t
  misc_feature (369)..(369): n is a, c, g, or t
  misc_feature (373)..(373): n is a, c, g, or t
cttagttctattgacaggacatttattatggagtcattaagtgaatcatgacctacagagtctagtttgtatgtaggtatgaagggaattttaaaaaataaattgaaaattaagctgtgaacagcattagaactttgtctatttcttgattttaaaatatgctgataatgccttaaactgtagttgtagaattgtcattttttgctgtttgaagataaccaatgttttctaaactgttgtgtaacctttcagtgttaatgcagattgtcatgtatgtaagctgcatgttagacacttntcttttttttttnataaactaaaataactgtattgacgtgaagcctattgttcctacaagtatgaaagtgntgantcagcaacctgccgagtaacttggtgt

SEQ ID NO: 4389 - DNA, 400 bp, Mus musculus; identical to SEQ ID NO: 4388
  misc_feature (298)..(298): n is a, c, g, or t
  misc_feature (311)..(311): n is a, c, g, or t
  misc_feature (369)..(369): n is a, c, g, or t
  misc_feature (373)..(373): n is a, c, g, or t

SEQ ID NO: 4390 - DNA, 254 bp, Mus musculus
ctttttatcttagatgtaggcagccatgaacaatctattttgagccactttagggagaaaaactttgtatttttaaaacttgcataaaaattatgcaagtggtttttataaattggaataatacctcagttttgaggttatgcacactaaattaaatatgtcataaattaatttgtacaaaaagaactctttataaggtggctcattgtaggaaatcctgtgccttcccctttgagcacaagtgttgcatgaac

SEQ ID NO: 4391 - DNA, 254 bp, Mus musculus; identical to SEQ ID NO: 4390

SEQ ID NO: 4392 - DNA, 335 bp, Mus musculus
  misc_feature (195)..(213): n is a, c, g, or t
  misc_feature (248)..(269): n is a, c, g, or t
  misc_feature (310)..(310): n is a, c, g, or t
ctgtgaccaaatagagtgggtgctgaagaacgtggctatcaagctgaggaagacgcggaaagtgaaggttctcacaggcacaggtaatgtcaatgttatccagcctgattatgccatggcagcccgagacttcctccggaccttccgcagtgggctgttgggccaggtgatgctggaccgtgacattatacctgnnnnnnnnnnnnnnnnnnncctggactggctggctggagtatggtctcctgcannnnnnnnnnnnnnnnnnnnnnagtgtttaatgcttaggactgttcctccagttcagaagctntctgtgctggtaactgaggctcagg

SEQ ID NO: 4393 - DNA, 335 bp, Mus musculus; identical to SEQ ID NO: 4392
  misc_feature (195)..(213): n is a, c, g, or t
  misc_feature (248)..(269): n is a, c, g, or t
  misc_feature (310)..(310): n is a, c, g, or t

SEQ ID NO: 4394 - DNA, 387 bp, Mus musculus
  misc_feature (26)..(26): n is a, c, g, or t
  misc_feature (62)..(62): n is a, c, g, or t
  misc_feature (93)..(93): n is a, c, g, or t
ggggcccacaatggtgaattcccctntgttaaccccatattgtcacttaaagtactgtaccntcatggtccccacagatgtgtccctagtgtntctcagtcttatggtgctattcacactggtgcaagacaaccactctccgttgtctgtggcttgacagatcagaacacagaaaaggagctgtggtggtgacctctaacctctgctcttttgccattttaaagtcaaatgtatatagttcccacgagctaacttacactcagtactgtatctgtgggttctgtcttgtgttgttttactttggggtgctggttatgaaagaacgcagaagaggagaggataaacaatggatgccatttagacatgaaaaactcaccatttcgttgg

SEQ ID NO: 4395 - DNA, 387 bp, Mus musculus; identical to SEQ ID NO: 4394
  misc_feature (26)..(26): n is a, c, g, or t
  misc_feature (62)..(62): n is a, c, g, or t
  misc_feature (93)..(93): n is a, c, g, or t

SEQ ID NO: 4396 - DNA, 387 bp, Mus musculus; identical to SEQ ID NO: 4394
  misc_feature (26)..(26): n is a, c, g, or t
  misc_feature (62)..(62): n is a, c, g, or t
  misc_feature (93)..(93): n is a, c, g, or t

SEQ ID NO: 4397 - DNA, 491 bp, Mus musculus
  misc_feature (171)..(185): n is a, c, g, or t
caaataatgtagctttcctgtgctcacaatgcctgtgttccaggtcagtgtccgatcctggcctgcttgaacaatggcttgggatgggtttgtgatgccccccccccaaaccatgatcaatacttaagggtgcagttgactgttagtagttgtgcagtaaagtcaagcccnnnnnnnnnnnnnnnaatagttaaaaagagtctcggttgatttctgtaacgtttgacctaatgaaatacccatttcatctgtgacaacacatagcccagtaaacatcactgtggtggtgccatgggggagttcctagtgacacttctgccctttgggttcccgtagaggaattcggcctccctgagcaaggtttggaatgaatggtttctgatagacacagggaggccagtttggattgagagcttatttcttcacatactctgtggcggtgttggaacccctggcttccggttttggtttccctgtaattctgtcttctc

SEQ ID NO: 4398 - DNA, 491 bp, Mus musculus; identical to SEQ ID NO: 4397
  misc_feature (171)..(185): n is a, c, g, or t

SEQ ID NO: 4399 - DNA, 427 bp, Mus musculus
  misc_feature (154)..(154): n is a, c, g, or t
  misc_feature (158)..(158): n is a, c, g, or t
gcatctccagtgacaaatttgaatacctttttaattttgataacacctttgagatccacgacgacatagaggtactgaagcggatgggaatgtcctttggtctggagtcaggcaaatgctctctggaggatctgaaaatcgcaaaatccctggntccnaaaagctttagaaggctatattacagatatctccacaggaccttcttggttaaatcagggactacttttgaactctacccaatcagtttcaaatttagacccgaccaccggtgccactgtaccccaatcaagtgtaaaccaagggttgtgcttggatgctgaagtggccttagcaactgggcagctccctgcctcaaacagtcaccagtccagcagtgcagcctctcacttctcggagtcccgcggcgagaccccctgttcattcaacg

SEQ ID NO: 4400 - DNA, 427 bp, Mus musculus; identical to SEQ ID NO: 4399
  misc_feature (154)..(154): n is a, c, g, or t
  misc_feature (158)..(158): n is a, c, g, or t

SEQ ID NO: 4401 - DNA, 444 bp, Mus musculus
  misc_feature (231)..(231): n is a, c, g, or t
ttcgagtgagcgtgtgtgcatgcatgtgagtttgtcagaggacaacctgttggaatcagctctcttctaccatgtgggtcccgggaatcaaatttaggcatggtgatgcctggctttgtctgctgagccacctttctgttccctgctcttccctactttgagccaagctcttgttatgcagccttgagccttcagtcctacttcagcctctcagtgggtggcattataggnatgcactgctactctgtaggccctttctcttgccaggaattggaggtctgacttgaaattccatatagcacctctcctaggtctggcctgagttgtcagagcagatgagagggactttgaccccagggaagaagtgaatggaagagcttcaaatatgtgacatagtatttgggagttcttcccaggcaggcctcagatcaggagtgaagccaa

SEQ ID NO: 4402 - DNA, 444 bp, Mus musculus; identical to SEQ ID NO: 4401
  misc_feature (231)..(231): n is a, c, g, or t

SEQ ID NO: 4403 - DNA, 459 bp, Mus musculus
  misc_feature (88)..(153): n is a, c, g, or t
  misc_feature (364)..(367): n is a, c, g, or t
tcttctgttcttgattcttggggagggtttccactgatttctgtctttcaaaaacaacttgtttttgtttgtttgtttgtttgtttannnnnnnnnnnnnnnnnnnnnnnnnnnnnnnnnnnnnnnnnnnnnnnnnnnnnnnnnnnnnnnnnngatgtagagtcatgcttttctgtttatacacatagtgcaggagtgtgtggatgaggcaggagccagtgttcagcataatcaggaagtagccagctgatcctgccatgcttatacaagccattttcaaaactgaaaatttttaggtcaagtatcttgaactttccaaactcttaacctataaaagcacttcgagatatttatcagattaaannnnagagtctggcattcctgcattttagtgggaaatcaaaaattagtgttttgttttatgcgtaggagtgttttgccagcgtgtgtgtggtatgc

SEQ ID NO: 4404 - DNA, 459 bp, Mus musculus; identical to SEQ ID NO: 4403
  misc_feature (88)..(153): n is a, c, g, or t
  misc_feature (364)..(367): n is a, c, g, or t

SEQ ID NO: 4405 - DNA, 334 bp, Mus musculus
  misc_feature (26)..(28): n is a, c, g, or t
  misc_feature (38)..(38): n is a, c, g, or t
  misc_feature (180)..(180): n is a, c, g, or t
  misc_feature (202)..(218): n is a, c, g, or t
agacgagaagtagctgcccgtagcannnagccctctgnagaatagcaaaacaaatctagataagttattttgcactttcttatgtataaaggtggtagaaacttatttttgctttgtatcatttaaatacattttgttttggtaaacagactgtgtataaactatttacgcggttgacgntgtttttaggaagtatttttcnnnnnnnnnnnnnnnnntacttgttgcatgatcattaacacagctgactttttgtgtcagtgccatgtatatttttgtcctgttattaacttgtaagccctagtaatggccaattatttgtacagcaacagaa

SEQ ID NO: 4406 - DNA, 334 bp, Mus musculus; identical to SEQ ID NO: 4405
  misc_feature (26)..(28): n is a, c, g, or t
  misc_feature (38)..(38): n is a, c, g, or t
  misc_feature (180)..(180): n is a, c, g, or t
  misc_feature (202)..(218): n is a, c, g, or t

SEQ ID NO: 4407 - DNA, 270 bp, Mus musculus
  misc_feature (54)..(54): n is a, c, g, or t
  misc_feature (81)..(96): n is a, c, g, or t
  misc_feature (117)..(117): n is a, c, g, or t
  misc_feature (120)..(120): n is a, c, g, or t
  misc_feature (122)..(122): n is a, c, g, or t
  misc_feature (160)..(160): n is a, c, g, or t
  misc_feature (197)..(197): n is a, c, g, or t
  misc_feature (210)..(210): n is a, c, g, or t
ctctgcatcgctgtttccaactgctgctttgaccctattgtttactacttcacntcagacacaattcagaactcaataaannnnnnnnnnnnnnnngttagaagaagtgactccagnttntntgaagttcagggcactgagaattttatccaacacaacntacagaccttaaaaaataagatatttgataatgaatntgcaatataagcngcctgactaagccactgggactgctccgtgttcaactgtgaaaactgtgttcttgggaac

SEQ ID NO: 4408 - DNA, 270 bp, Mus musculus; identical to SEQ ID NO: 4407
  misc_feature (54)..(54): n is a, c, g, or t
  misc_feature (81)..(96): n is a, c, g, or t
  misc_feature (117)..(117): n is a, c, g, or t
  misc_feature (120)..(120): n is a, c, g, or t
  misc_feature (122)..(122): n is a, c, g, or t
  misc_feature (160)..(160): n is a, c, g, or t
  misc_feature (197)..(197): n is a, c, g, or t
  misc_feature (210)..(210): n is a, c, g, or t

SEQ ID NO: 4409 - DNA, 481 bp, Mus musculus
  misc_feature (35)..(35): n is a, c, g, or t
  misc_feature (63)..(63): n is a, c, g, or t
  misc_feature (66)..(66): n is a, c, g, or t
  misc_feature (114)..(114): n is a, c, g, or t
  misc_feature (121)..(121): n is a, c, g, or t
  misc_feature (200)..(200): n is a, c, g, or t
  misc_feature (241)..(241): n is a, c, g, or t
agcaccgatttgattacactagatgtagtgttgtnataaactgtttatggggctgatgtgtanagntgttcacgttatttgatgtttacacctcagggaaaggcttgtgttcancaatatntaaagataatgttactatgacaacatttttactgtcctttaaaaagcattgcaatagcgtgtttggatatgcatcaatntaatcttgcgttcagtgaattaaacatgactaattaagtgnctattgcccttgattttgatattagaataggtgactacatgggtatttaatatttctatattctgcttttctagctgtttttacctagttagcttgtgattttgctgaatggtatgtaaacgtgtaaaaactgaaatttgacagagcaatccagtcaatgtgttaggggtcaaaaaaattgaaggctgtaacatttttggtaaaaactcatgtatttgctacagtagtgcagcttaatta

SEQ ID NO: 4410 - DNA, 481 bp, Mus musculus; identical to SEQ ID NO: 4409
  misc_feature (35)..(35): n is a, c, g, or t
  misc_feature (63)..(63): n is a, c, g, or t
  misc_feature (66)..(66): n is a, c, g, or t
  misc_feature (114)..(114): n is a, c, g, or t
  misc_feature (121)..(121): n is a, c, g, or t
  misc_feature (200)..(200): n is a, c, g, or t
  misc_feature (241)..(241): n is a, c, g, or t

SEQ ID NO: 4411 - DNA, 339 bp, Mus musculus
  misc_feature (35)..(49): n is a, c, g, or t
  misc_feature (270)..(297): n is a, c, g, or t
aactctacagatgaaagaaatcgctcagtcctgcnnnnnnnnnnnnnnngtcagcatgtggcttgcaccaggctcctcctacagtcgggactgaaggattccgaagacctcacaggcaccttggcccagcagctcacgagaagcgtagatatccttcaggactttgaccatgacgtgaaatcgtaggatgcttgaagaaggaggcgatggagttcaaggccgttcatattctgctccttctgttgctgagagacagggtatcgagttccnnnnnnnnnnnnnnnnnnnnnnnnnnnngctgcctttccttctgcatgctcttcggtcgaatgaccagga

SEQ ID NO: 4412 - DNA, 339 bp, Mus musculus; identical to SEQ ID NO: 4411
  misc_feature (35)..(49): n is a, c, g, or t
  misc_feature (270)..(297): n is a, c, g, or t

SEQ ID NO: 4413 - DNA, 253 bp, Mus musculus
  misc_feature (26)..(26): n is a, c, g, or t
  misc_feature (28)..(29): n is a, c, g, or t
  misc_feature (31)..(31): n is a, c, g, or t
  misc_feature (60)..(60): n is a, c, g, or t
  misc_feature (69)..(95): n is a, c, g, or t
  misc_feature (99)..(117): n is a, c, g, or t
  misc_feature (142)..(142): n is a, c, g, or t
gactgtaccaggtagtccttgtaacntnntnttccccgcagccatggctgatgggacttntgcctgacnnnnnnnnnnnnnnnnnnnnnnnnnnntccnnnnnnnnnnnnnnnnnnntataaaaaccagcctccaacctgcnagtggtgtgtggcatactgtgttcagtcccgggcaagcgtgacaccaaaaagctgtgaggagccagaatcacatccagtctgtgctcagtggtctgcagtgaggacctgat

SEQ ID NO: 4414 - DNA, 253 bp, Mus musculus; identical to SEQ ID NO: 4413
  misc_feature (26)..(26): n is a, c, g, or t
  misc_feature (28)..(29): n is a, c, g, or t
  misc_feature (31)..(31): n is a, c, g, or t
  misc_feature (60)..(60): n is a, c, g, or t
  misc_feature (69)..(95): n is a, c, g, or t
  misc_feature (99)..(117): n is a, c, g, or t
  misc_feature (142)..(142): n is a, c, g, or t

SEQ ID NO: 4415 - DNA, 445 bp, Mus musculus
  misc_feature (49)..(49): n is a, c, g, or t
  misc_feature (51)..(51): n is a, c, g, or t
  misc_feature (53)..(53): n is a, c, g, or t
  misc_feature (168)..(168): n is a, c, g, or t
  misc_feature (334)..(334): n is a, c, g, or t
  misc_feature (336)..(337): n is a, c, g, or t
  misc_feature (340)..(340): n is a, c, g, or t
  misc_feature (345)..(346): n is a, c, g, or t
  misc_feature (349)..(350): n is a, c, g, or t
  misc_feature (352)..(352): n is a, c, g, or t
  misc_feature (357)..(357): n is a, c, g, or t
  misc_feature (359)..(359): n is a, c, g, or t
tcaagagagccctaggagctgtgtctactccatcatggactcttgtcanangnctggctgatgccaaggcctttgtgggtcagtcatgtaggctcatctgctcagaaagtaggttttgttgactgagataaagaagtttttattagactaggctggcctcaaacttgnggctgcctcatgtctgcttctcaagtgctgagatctcagatgtctgtcactatggtcagcaggacttaggtcatgaacaactgatctgctttaagcacatgtgtccgtggtgattgaggacaccatgtcctcactgaaaccagacagcagctggcaggagattggnanntanaccanncanntnttttntnagaacttgactttgtgtagcagtaaggatggaggcaggtggtgagtggggaaaacatgggagctgctgggctattggcccagcttt

SEQ ID NO: 4416 - DNA, 445 bp, Mus musculus; identical to SEQ ID NO: 4415
  misc_feature (49)..(49): n is a, c, g, or t
  misc_feature (51)..(51): n is a, c, g, or t
  misc_feature (53)..(53): n is a, c, g, or t
  misc_feature (168)..(168): n is a, c, g, or t
  misc_feature (334)..(334): n is a, c, g, or t
  misc_feature (336)..(337): n is a, c, g, or t
  misc_feature (340)..(340): n is a, c, g, or t
  misc_feature (345)..(346): n is a, c, g, or t
  misc_feature (349)..(350): n is a, c, g, or t
  misc_feature (352)..(352): n is a, c, g, or t
  misc_feature (357)..(357): n is a, c, g, or t
  misc_feature (359)..(359): n is a, c, g, or t

SEQ ID NO: 4417 - DNA, 465 bp, Mus musculus
  misc_feature (199)..(199): n is a, c, g, or t
  misc_feature (326)..(343): n is a, c, g, or t
gaacctgcccttggaataggtacttaaaactaaagctaactgtttattgctaaatttgaaatattctgagtcgaaatgagtatattgtctggactttctgcatcagctatagttatggagataagacaatattcctgggacagaaactatgctcagaaccctgtgaaagaaaacctcatcctgtatgtcttcgaacatnacagctggtctcaggtggttaactatcttaggctggagtatactaagcataccatatttaatactcatatatgacatagcagaactagccttagggttgtggtctgtccagaagaactaaatttagnnnnnnnnnnnnnnnnnntctattgaggaggaaacggggtaatatgtacagtaacaatgtttagttattctcaatgcagattcttggcattccattccatttctgttgattatttcagaattatctgtggggatgaacgc

SEQ ID NO: 4418 - DNA, 465 bp, Mus musculus; identical to SEQ ID NO: 4417
  misc_feature (199)..(199): n is a, c, g, or t
  misc_feature (326)..(343): n is a, c, g, or t

SEQ ID NO: 4419 - DNA, 295 bp, Mus musculus
  misc_feature (64)..(81): n is a, c, g, or t
ctcatatatgacatagcagaactagccttagggttgtggtctgtccagaagaactaaatttagnnnnnnnnnnnnnnnnnntctattgaggaggaaacggggtaatatgtacagtaacaatgtttagttattctcaatgcagattcttggcattccattccatttctgttgattatttcagaattatctgtggggatgaacgccgtgtgctgctgcagctgcgcactggtcagagcctgctggtagtgcaagacgctggggttgaagaccgtgctggccccgttgcttttttcaa

SEQ ID NO: 4420 - DNA, 295 bp, Mus musculus; identical to SEQ ID NO: 4419
  misc_feature (64)..(81): n is a, c, g, or t

SEQ ID NO: 4421 - DNA, 357 bp, Mus musculus
  misc_feature (97)..(111): n is a, c, g, or t
  misc_feature (140)..(159): n is a, c, g, or t
  misc_feature (162)..(164): n is a, c, g, or t
  misc_feature (170)..(170): n is a, c, g, or t
  misc_feature (247)..(247): n is a, c, g, or t
  misc_feature (279)..(279): n is a, c, g, or t
  misc_feature (300)..(301): n is a, c, g, or t
  misc_feature (306)..(306): n is a, c, g, or t
aaggtcagccacgtgaggtgagacactgcctggaagcctcctgtgcagttagactcttcatgttaacttgctccctgttgagagtgttggtgcaatnnnnnnnnnnnnnnnccaggggaggagctctactgttcctgagnnnnnnnnnnnnnnnnnnnnggnnnaagccnagagtgcttagactcagtttccaggcactgagcttcggctgcgaaagtttctcctgctttttgctttagcaagtggncttggggaaagggttgtattcttggccttcangtcacgtgactcccgctgagnngttgntgctgtctgtggactgtgtgtgggtgctttggttgcatggacgctagggct

SEQ ID NO: 4422 - DNA, 357 bp, Mus musculus; identical to SEQ ID NO: 4421
  misc_feature (97)..(111): n is a, c, g, or t
  misc_feature (140)..(159): n is a, c, g, or t
  misc_feature (162)..(164): n is a, c, g, or t
  misc_feature (170)..(170): n is a, c, g, or t
  misc_feature (247)..(247): n is a, c, g, or t
  misc_feature (279)..(279): n is a, c, g, or t
  misc_feature (300)..(301): n is a, c, g, or t
  misc_feature (306)..(306): n is a, c, g, or t

SEQ ID NO: 4423 - DNA, 500 bp, Mus musculus
  misc_feature (143)..(143): n is a, c, g, or t
gcttcagaacctctgtgacctctatgccttaaacggtattctgactaactcaggggactttctgcatgatggcttcctgtctggggcccaagtggacatggcaagaacagccttcctagacctgcttcccttgatccggaagnacgccatcttgttaacagatgcttttgacttctcggaccattgtttaaactctgcacttggctgttatgacggacacgtctaccaacgcctgtttgagtgggctcagaagtccccagccaatactcaggagaaccctgcctataagaagtatattagaccactgatgcaaagctggaaacccaagctgtgaaaagccaaaggattcaggaccaagcagcaccatggccttcctatggcacatatgcatataaagaatttaaagcacggggtggcgtgcggcttgttcagatcagcgagtaaactggtacatgaaaggatgttcatcatattattctgctactgagtacatctgaaac

SEQ ID NO: 4424 - DNA, 500 bp, Mus musculus; identical to SEQ ID NO: 4423
  misc_feature (143)..(143): n is a, c, g, or t

SEQ ID NO: 4425 - DNA, 368 bp, Mus musculus
  misc_feature (171)..(185): n is a, c, g, or t
tttctagatggacttgtaaaaaccaaaccgtgatttgtgaggttagaagtgtgtatttgggggcctcaggtgtgtgtgtggttttattttcctccagacgttttgaactttagtcaataattgtgtgtgttatttttaagaagtaacttttattttttctctagtaaaatnnnnnnnnnnnnnnncttctgaaggcaggatatgagctatggattctgaaaagtattgtaggttgtactatgtgccttcttagtgtgtttatgggcacaatgttttctctcatcaacttgaaacttaaaagggacattttggttagattactgtacaccaatctatgcataaatggcagcttgttttcttgagccact

SEQ ID NO: 4426 - DNA, 368 bp, Mus musculus; identical to SEQ ID NO: 4425
  misc_feature (171)..(185): n is a, c, g, or t

SEQ ID NO: 4427 - DNA, 253 bp, Mus musculus
  misc_feature (80)..(81): n is a, c, g, or t
  misc_feature (165)..(185): n is a, c, g, or t
ggcttaaatatctagctctgtaacacatccttgggctccagtcttagtttttgcctgatcttaccatcattgagagaggnncggcagaaaacttttcctggtgtccctgctggtcctggtccctcctgctgactcgtgccaatgtggccgaggcctgactttttnnnnnnnnnnnnnnnnnnnnngctgattcatgtttgcaatcctgacactactgaactggactgctggtgtacatcctgacaacacagat

SEQ ID NO: 4428 - DNA, 253 bp, Mus musculus; identical to SEQ ID NO: 4427
  misc_feature (80)..(81): n is a, c, g, or t
  misc_feature (165)..(185): n is a, c, g, or t

SEQ ID NO: 4429 - DNA, 566 bp, Mus musculus
  misc_feature (251)..(251): n is a, c, g, or t
  misc_feature (309)..(310): n is a, c, g, or t
  misc_feature (312)..(317): n is a, c, g, or t
  misc_feature (445)..(446): n is a, c, g, or t
  misc_feature (458)..(458): n is a, c, g, or t
  misc_feature (498)..(498): n is a, c, g, or t
  misc_feature (527)..(527): n is a, c, g, or t
tgtccaggagggtagtaagaaacctggatctgttgagggggctgcatgtagccttggggtggcaggacttgctgggtaggtggagcatggctagaagtggaataattggaagtgggaaggggctgtcctgcagaagccatgatgaaactagcttgctgaggatgctgggagataagtgggggctggaacaaagccgaggaggggtcagctgcttcagtagaaccttggcggctaaggctcatttgtccaanggggttgctgaggtcttctgcctgtgaaatcatgtgattattcaagggtggctggtgnngnnnnnngggtgggagagcaggaagttgttgttgttgttgttgttgctgctgctgctgctgggcagtacaaggaagaaggccccggacagactggggtgaggtgacctggttgcacacttctggggcacctagtnncatgcctggccnggagagcctgcctgcactgccgcctttactgctgccaatnctgtcgcctcgggtgaggatggagattcnactgaagctgctggctttggtgacaggaggtcgcatgct

SEQ ID NO: 4430 - DNA, 566 bp, Mus musculus; identical to SEQ ID NO: 4429
  misc_feature (251)..(251): n is a, c, g, or t
  misc_feature (309)..(310): n is a, c, g, or t
  misc_feature (312)..(317): n is a, c, g, or t
  misc_feature (445)..(446): n is a, c, g, or t
  misc_feature (458)..(458): n is a, c, g, or t
  misc_feature (498)..(498): n is a, c, g, or t
  misc_feature (527)..(527): n is a, c, g, or t

SEQ ID NO: 4431 - DNA, 473 bp, Mus musculus
  misc_feature (59)..(59): n is a, c, g, or t
  misc_feature (103)..(103): n is a, c, g, or t
  misc_feature (286)..(286): n is a, c, g, or t
  misc_feature (293)..(293): n is a, c, g, or t
  misc_feature (325)..(325): n is a, c, g, or t
tgttcctgacggtggctgagcccccagcccctggaatatgcagcccggaggagccccangcaaggacgcggtggcggagtggggcgggaggcatggtctccanctaccgggtggccgtgctgggggctcgaggtgtgggcaagagtgccatcgtgcgccaattcttatacaacgagttcagcgaggtctgtgtgcccaccaccacccgccgcctctacctgcctgctgtggtcatgaatggccatgtgcacgacctgcagatcctggacttcccacccatcagcgnccttccnctgtcaacacactgcaggagtgggcagatgcntgctgcaggggactccgaagcgtccacgcctacatcctggtctatgacatctgctgctttgacagctttgagtacgtcaagactatccgtcagcagatcctggagacgagggtgatcggcacctcggagacgcccatcatcatcgtgg

SEQ ID NO: 4432 - DNA, 473 bp, Mus musculus; identical to SEQ ID NO: 4431
  misc_feature (59)..(59): n is a, c, g, or t
  misc_feature (103)..(103): n is a, c, g, or t
  misc_feature (286)..(286): n is a, c, g, or t
  misc_feature (293)..(293): n is a, c, g, or t
  misc_feature (325)..(325): n is a, c, g, or t

SEQ ID NO: 4433 - DNA, 442 bp, Mus musculus
ctattgcttggtacacaattgataattattaatgtttcctatgtgctctataagaatgtatgtcctctgattattgaatatagaaatctatgtgtgtctattagcaactatcttattcaaattatatttatctaaactgattgcttttgttatgatctaccaagagtttttatagttaactctgacagtggggttctctgttttcttcttatagtttccttttttaacataaattaagaattgttatatttcttgtaaaagtgtaatatccttctctattcctgatgatagaggaattatgccaggttatcttgtattaatgtaacagcacaagcttttcttcttgttagggtttggtggtatataattttctatctttttacttttaagaattttttacacctttgtgttttaattatatttcttgaaaacagcatatggc

SEQ ID NO: 4434 - DNA, 442 bp, Mus musculus; identical to SEQ ID NO: 4433

SEQ ID NO: 4435 - DNA, 548 bp, Mus musculus
  misc_feature (58)..(58): n is a, c, g, or t
  misc_feature (63)..(63): n is a, c, g, or t
  misc_feature (79)..(79): n is a, c, g, or t
  misc_feature (91)..(91): n is a, c, g, or t
  misc_feature (119)..(119): n is a, c, g, or t
  misc_feature (177)..(179): n is a, c, g, or t
  misc_feature (182)..(183): n is a, c, g, or t
  misc_feature (185)..(187): n is a, c, g, or t
  misc_feature (189)..(190): n is a, c, g, or t
  misc_feature (193)..(194): n is a, c, g, or t
  misc_feature (225)..(225): n is a, c, g, or t
  misc_feature (490)..(490): n is a, c, g, or t
  misc_feature (496)..(496): n is a, c, g, or t
  misc_feature (520)..(520): n is a, c, g, or t
cacagaatccctgaaggggaaaaatacagaaaatatgggtttctacggcacattaaanatgantttttacaaaatgaanagaaagttggancatggttctgaagttcgttccttttctntgggaaagaaaccatgcaaagtctcagattataccagtaccactggccttgtaccatnnncannannncnnacnncttttggggacctgagagcagccaatgggcnagggcagcagcggcggaggattacatctgtccaaccacccacaggccttcaagagtggctgaaaatgtttcagagctggagcggaccagagaagttgctggctttagatgagctcattgacagctgtgaaccaacacaagtgaagcatatgatgcaagtgatagagccccagttccagcgagacttcatctccttgcttcctaaagagttggcactctatgtgctttcattcctggaacccaaagacctgctgcaagcggctcanacttgncgatactggagaattttggctgangataaccttctctggagagagaaatgta

SEQ ID NO: 4436 - DNA, 548 bp, Mus musculus; identical to SEQ ID NO: 4435
  misc_feature (58)..(58): n is a, c, g, or t
  misc_feature (63)..(63): n is a, c, g, or t
  misc_feature (79)..(79): n is a, c, g, or t
  misc_feature (91)..(91): n is a, c, g, or t
  misc_feature (119)..(119): n is a, c, g, or t
  misc_feature (177)..(179): n is a, c, g, or t
  misc_feature (182)..(183): n is a, c, g, or t
  misc_feature (185)..(187): n is a, c, g, or t
  misc_feature (189)..(190): n is a, c, g, or t
  misc_feature (193)..(194): n is a, c, g, or t
  misc_feature (225)..(225): n is a, c, g, or t
  misc_feature (490)..(490): n is a, c, g, or t
  misc_feature (496)..(496): n is a, c, g, or t
  misc_feature (520)..(520): n is a, c, g, or t

SEQ ID NO: 4437 - DNA, 350 bp, Mus musculus
  misc_feature (91)..(91): n is a, c, g, or t
  misc_feature (93)..(95): n is a, c, g, or t
  misc_feature (97)..(108): n is a, c, g, or t
  misc_feature (176)..(176): n is a, c, g, or t
tacccgagtcccaggcttacatggacctcctagcatttgagaggaaactggatcaaaccatcatgcggaagcgggtggacatccaggaggncnnnannnnnnnnnnnnagcaaaagcgaaagctgcgcctttatatctccaatacttttaaccctgcgaagcctgatgcggaagantctgatggcagcattgcctcctgggagctgcgggtggaggggaagctcttggatgatgtatgtcctggtccaagcctctccaggtgtctttgctattctttctgcctctcgtctgtctttgaagtgaggattggtggatgctgtgcggtcacatgtttgggagcatggaaatca

SEQ ID NO: 4438 - DNA, 350 bp, Mus musculus; identical to SEQ ID NO: 4437
  misc_feature (91)..(91): n is a, c, g, or t
  misc_feature (93)..(95): n is a, c, g, or t
  misc_feature (97)..(108): n is a, c, g, or t
  misc_feature (176)..(176): n is a, c, g, or t

SEQ ID NO: 4439 - DNA, 494 bp, Mus musculus
  misc_feature (31)..(31): n is a, c, g, or t
  misc_feature (40)..(61): n is a, c, g, or t
  misc_feature (109)..(109): n is a, c, g, or t
  misc_feature (145)..(145): n is a, c, g, or t
acttaaccgtggagtagtttatctgggccanctaccttcnnnnnnnnnnnnnnnnnnnnnntataactactgtgcccagtttggcgacattagcagattcagattgtcnagaagtaagcggactggaaacagcaaaggctatgcntttgtggagtttgagtctgaggatgttgccaagatagttgcagaaacaatggataactacctttttggtgaaagacttctatcatgtaaatttatgccacgaaaaaaagtccataaagaccttttcagccagaggaatgctctgtttcaccggccatcattcccagcagtgaagcgctataatcggaaacgaggacatttgcagatgttgaagatggagtataggtttaagaagaaggaaaaattactccggaagaaactagctgcaaaggggattgattatagttttccctcactggtcctacctaagccaaagaacattgctgtcgctcatagagattctgagggta

SEQ ID NO: 4440 - DNA, 494 bp, Mus musculus; identical to SEQ ID NO: 4439
  misc_feature (31)..(31): n is a, c, g, or t
  misc_feature (40)..(61): n is a, c, g, or t
  misc_feature (109)..(109): n is a, c, g, or t
  misc_feature (145)..(145): n is a, c, g, or t

SEQ ID NO: 4441 - DNA, 208 bp, Mus musculus
  misc_feature (33)..(33): n is a, c, g, or t
  misc_feature (75)..(75): n is a, c, g, or t
agtgaccattttaatgtgcctaagccacttgantggggtgggtcagacactcccagctttgcacacacagacaantggacacacacacacacacacacacacacacaatgtgccagagactgactatctgcctcacacacgctccaggctttgggagaccctgggtttcctgggctcaattgggcacaaattggcttttgggggccct

SEQ ID NO: 4442 - DNA, 208 bp, Mus musculus; identical to SEQ ID NO: 4441
  misc_feature (33)..(33): n is a, c, g, or t
  misc_feature (75)..(75): n is a, c, g, or t

SEQ ID NO: 4443 - DNA, 203 bp, Mus musculus
  misc_feature (72)..(86): n is a, c, g, or t
atcttttagttgctatatgaagctcttaattatttggtaattatgcttttaatatctatttggaaattttannnnnnnnnnnnnnngcctttcagttatctgatactttggaaatagcttatatcatatttattttcaagaaagtatttctttgtatgtgatatgtaaatcccacgagtaccagccttatagttggctcctgg

SEQ ID NO: 4444 - DNA, 203 bp, Mus musculus; identical to SEQ ID NO: 4443
  misc_feature (72)..(86): n is a, c, g, or t

SEQ ID NO: 4445 - DNA, 477 bp, Mus musculus
  misc_feature (362)..(362): n is a, c, g, or t
  misc_feature (365)..(366): n is a, c, g, or t
  misc_feature (372)..(372): n is a, c, g, or t
  misc_feature (402)..(402): n is a, c, g, or t
  misc_feature (406)..(406): n is a, c, g, or t
  misc_feature (429)..(443): n is a, c, g, or t
gcgcattatagcattgtctggaaagaggatttaagtctttcattatggttatatcaccttctgagttttacgcggtggactcttaaaactattacaaaatgtgaatttataacgtactttgttttccctctgtgacctgttatttcaggtcacttgaggacatcttagcggtctgcagtgcccaagtcagcagtgggacttcagaaggaaaagttgcctacccttctcccatcctgcttatgtgcatatatacatgtgtgtgcatgtgtgcgtgcatatgtatatcttacaacaacagaaaacctggaggccacatcttgatccagaatgttctgttgtgttgctgggctcccccattctgnagnnggactntaagaagatccatggagtagatcaaagctnttanttaattgcacagctcacaacttnnnnnnnnnnnnnnnccactccggtgttggcctccacaccgttgtctct

SEQ ID NO: 4446 - DNA, 477 bp, Mus musculus; identical to SEQ ID NO: 4445
  misc_feature (362)..(362): n is a, c, g, or t
  misc_feature (365)..(366): n is a, c, g, or t
  misc_feature (372)..(372): n is a, c, g, or t
  misc_feature (402)..(402): n is a, c, g, or t
  misc_feature (406)..(406): n is a, c, g, or t
  misc_feature (429)..(443): n is a, c, g, or t

SEQ ID NO: 4447 - DNA, 394 bp, Mus musculus
  misc_feature (165)..(165): n is a, c, g, or t
  misc_feature (167)..(167): n is a, c, g, or t
  misc_feature (345)..(359): n is a, c, g, or t
acataacaatatacttcattggtggactgcacttaccttttaagtggctacatcttaggaacaataaatttattaaaattcttggctgaatcaaaatggttttgttttgtttccacccaaataactagaaattcggaccaaaatagatgttttccaagggcagancntgcactgtggcttgtgactagcctcattagttgcctgttaataaacattagctgaatagttaccagtgttgttaccagcatttgtcctcttgtgaattcaagagtcctcgcactctttaacatgttctttataaaatgtataaacccttccaaactatttaaagaggagtgttattgnnnnnnnnnnnnnnnaattttgagtttgcctcagaagactactaaagcaa

SEQ ID NO: 4448 - DNA, 394 bp, Mus musculus; identical to SEQ ID NO: 4447
  misc_feature (165)..(165): n is a, c, g, or t
  misc_feature (167)..(167): n is a, c, g, or t
  misc_feature (345)..(359): n is a, c, g, or t

SEQ ID NO: 4449 - DNA, 460 bp, Mus musculus
  misc_feature (30)..(30): n is a, c, g, or t
  misc_feature (191)..(205): n is a, c, g, or t
  misc_feature (268)..(284): n is a, c, g, or t
ggagaaaccatggagcctgcactgcgtgcngtgtgcaaggatgtgcgcatcggcactatcctcatccagaccaaccagctcacaggggagcctgagctccattacctgaggcttcccaaggatatcagtgatgaccatgtgatcctgatggactgcacagtatccacaggtgctgcggccatgatggctgnnnnnnnnnnnnnnnaccatgatgtgcctgaggacaagatctttttgctgtccctgctcatggcagagatgggtgtgnnnnnnnnnnnnnnnnntttcccacgcgtgagaatcatcaccacagctgtggacaagcgtgtcaatgaccttttccgtatcatcccaggcattgggaactttggtgatcgctactttgggacagatgcagtccctgatggcagtgatgatgatgaggcagccactgtgggttagttccctgtccgagctactc

SEQ ID NO: 4450 - DNA, 460 bp, Mus musculus; identical to SEQ ID NO: 4449
  misc_feature (30)..(30): n is a, c, g, or t
  misc_feature (191)..(205): n is a, c, g, or t
  misc_feature (268)..(284): n is a, c, g, or t

SEQ ID NO: 4451 - DNA, 343 bp, Mus musculus
  misc_feature (136)..(150): n is a, c, g, or t
cagggacttgccagcatctaatgtcatgttcttagtgatcatttctatcattaatagaagctttgaagatggcttgtgtagacttggaatgtggttattattatttttccttgtataatgcttattaagcaggggnnnnnnnnnnnnnnncttttgaggggctgaggctcaggaggcttgtcataaattgaggccagcttgggctagggagagagaacttgattccaaaaacaaaaggggaaaaaggcttatataacttcaagtagaatgcttgaaattggtgttgatttttcaagctttttaaatcttaatttctgttgccatagttttgtattacgacaaa

SEQ ID NO: 4452 - DNA, 343 bp, Mus musculus; identical to SEQ ID NO: 4451
  misc_feature (136)..(150): n is a, c, g, or t

SEQ ID NO: 4453 - DNA, 550 bp, Mus musculus
  misc_feature (26)..(26): n is a, c, g, or t
  misc_feature (38)..(38): n is a, c, g, or t
  misc_feature (41)..(41): n is a, c, g, or t
  misc_feature (59)..(59): n is a, c, g, or t
  misc_feature (68)..(68): n is a, c, g, or t
  misc_feature (158)..(159): n is a, c, g, or t
  misc_feature (161)..(161): n is a, c, g, or t
  misc_feature (164)..(168): n is a, c, g, or t
  misc_feature (219)..(219): n is a, c, g, or t
  misc_feature (411)..(411): n is a, c, g, or t
  misc_feature (416)..(416): n is a, c, g, or t
  misc_feature (424)..(424): n is a, c, g, or t
  misc_feature (436)..(436): n is a, c, g, or t
tccaaccaaggtgctaaaaggaacanacaggagagtcntcntctctgatccacaaaggnagagccctnaagattcatccagcagggttagggctgatgcatttgcctctgcctggattttgtttttattttctttctttttgcccagtggtacaaaannanaannnnnttatggaatactgagtgggttcattcctctcttgccctctccaatggcccntctatttatctggctaaggaaacaccacgcattggctagtattaaacagcaactgtaagatagagggctttctgttctatgtcattgccttcagtatcaaggctgcctggagaaaggatggcagcctcagggcttccttactttcttctcctttcctgacagagcagcctttctgtcctgctctctgctgcncctcncaatatantccatgggtacncaggctggttcttgggctaggttgtgggggccacactcacctcttccctgccagttctaacacgacagacatgaagccagtgttagtgggaagagctgggttttcccaggatga

SEQ ID NO: 4454 - DNA, 550 bp, Mus musculus; identical to SEQ ID NO: 4453
  misc_feature (26)..(26): n is a, c, g, or t
  misc_feature (38)..(38): n is a, c, g, or t
  misc_feature (41)..(41): n is a, c, g, or t
  misc_feature (59)..(59): n is a, c, g, or t
  misc_feature (68)..(68): n is a, c, g, or t
  misc_feature (158)..(159): n is a, c, g, or t
  misc_feature (161)..(161): n is a, c, g, or t
  misc_feature (164)..(168): n is a, c, g, or t
  misc_feature (219)..(219): n is a, c, g, or t
  misc_feature (411)..(411): n is a, c, g, or t
  misc_feature (416)..(416): n is a, c, g, or t
  misc_feature (424)..(424): n is a, c, g, or t
  misc_feature (436)..(436): n is a, c, g, or t

SEQ ID NO: 4455 - DNA, 404 bp, Mus musculus
  misc_feature (54)..(54): n is a, c, g, or t
  misc_feature (65)..(101): n is a, c, g, or t
  misc_feature (218)..(235): n is a, c, g, or t
  misc_feature (260)..(260): n is a, c, g, or t
  misc_feature (284)..(284): n is a, c, g, or t
  misc_feature (376)..(376): n is a, c, g, or t
tatggcgactaactcctaggagttgctttactctgtcaggtgacttaagtcacntgggagtcacnnnnnnnnnnnnnnnnnnnnnnnnnnnnnnnnnnnnntattgtaaatatctcagtgttacatagtgaagcttaaagtgtttgtagtcttgcataaggacacagcctaaataactgaccccttactcgctctgaagagcctccctgccccacccnnnnnnnnnnnnnnnnnngtgtgggccatgtgcagcgtgtttntgtgcagataatgtggccctgttntcgggaacccagaaccttttacagacattttttaattgtgttccttcctgctgccacaatcagcatgactgtatagagtcccttataccatntacacatccagagttatatggaagcaga

SEQ ID NO: 4456 - DNA, 404 bp, Mus musculus; identical to SEQ ID NO: 4455
  misc_feature (54)..(54): n is a, c, g, or t
  misc_feature (65)..(101): n is a, c, g, or t
  misc_feature (218)..(235): n is a, c, g, or t
  misc_feature (260)..(260): n is a, c, g, or t
  misc_feature (284)..(284): n is a, c, g, or t
  misc_feature (376)..(376): n is a, c, g, or t

SEQ ID NO: 4457 - DNA, 475 bp, Mus musculus
  misc_feature (51)..(292): n is a, c, g, or t
  misc_feature (346)..(357): n is a, c, g, or t
  misc_feature (401)..(401): n is a, c, g, or t
  misc_feature (445)..(445): n is a, c, g, or t
gaaactgatgaaacctcggtggcaagttagtcagattagctgtcaacaagnnnnnnnnnnnnnnnnnnnnnnnnnnnnnnnnnnnnnnnnnnnnnnnnnnnnnnnnnnnnnnnnnnnnnnnnnnnnnnnnnnnnnnnnnnnnnnnnnnnnnnnnnnnnnnnnnnnnnnnnnnnnnnnnnnnnnnnnnnnnnnnnnnnnnnnnnnnnnnnnnnnnnnnnnnnnnnnnnnnnnnnnnnnnnnnnnnnnnnnnnnnnnnnnnnnnnnnnnnnnnnnnnnnnnnnnnnnnnnnnnnctggagcatctatctgcacgctgcggtttcgactttcccccaagtgcatagcgnnnnnnnnnnnnagagtcctgacgttgctacggaagtcaaggaaaagccttctgcntcctcaggccttcttgcccctcaaatttcctgtatttcttcccntcttacctgtccacgagatttagcttaatt

SEQ ID NO: 4458 - DNA, 475 bp, Mus musculus; identical to SEQ ID NO: 4457
  misc_feature (51)..(292): n is a, c, g, or t
  misc_feature (346)..(357): n is a, c, g, or t
  misc_feature (401)..(401): n is a, c, g, or t
  misc_feature (445)..(445): n is a, c, g, or t

SEQ ID NO: 4459 - DNA, 406 bp, Mus musculus
  misc_feature (180)..(180): n is a, c, g, or t
  misc_feature (185)..(185): n is a, c, g, or t
  misc_feature (226)..(226): n is a, c, g, or t
aagatactgttacctagaggtcttgaggatctgtgttctctggggggaggaaaggaggaggaacccagaactttcttacagttttccttgttctgtcacatgtcaagactgaaggaacaggctgggctacgtagtgagatcctgtctcaaaggaaagacgagcatagccgaacccccggnggaancccctctgttacctgttcacacaagcttattgatgagtctnatgttaatgtcttgtttgtatgaagtttaagaaaatatcgggttgggcaacacattctatttattcattttatttgaaatcttaatgccatctcatggtgttggattggtgtggcactttattcttttgtgttgtgtataaccataaattttattttgcatcagattgtcaatgtattgc

SEQ ID NO: 4460 - DNA, 406 bp, Mus musculus; identical to SEQ ID NO: 4459
  misc_feature (180)..(180): n is a, c, g, or t
  misc_feature (185)..(185): n is a, c, g, or t
  misc_feature (226)..(226): n is a, c, g, or t

SEQ ID NO: 4461 - DNA, 291 bp, Mus musculus
  misc_feature (44)..(44): n is a, c, g, or t
  misc_feature (154)..(170): n is a, c, g, or t
tatgggattgccttgcatagacagcacagagttcagccccccangtgaggaagttgttctcccagaggtaattcgtggcccatagagaaaaccaagcagaagagaacgagaccttccttccctggggtataaggcagggagccctcgagggagnnnnnnnnnnnnnnnnngcctgaggacccaatcagaaaaacaaatgcactaccatcaggaagccactgtccttcagcagctaagcagctgtcctccagctgaccccctcggagtgcctccaggagacctggggctgtt

SEQ ID NO: 4462 - DNA, 291 bp, Mus musculus; identical to SEQ ID NO: 4461
  misc_feature (44)..(44): n is a, c, g, or t
  misc_feature (154)..(170): n is a, c, g, or t

SEQ ID NO: 4463 - DNA, 392 bp, Mus musculus
  misc_feature (54)..(54): n is a, c, g, or t
  misc_feature (86)..(86): n is a, c, g, or t
  misc_feature (123)..(124): n is a, c, g, or t
  misc_feature (206)..(206): n is a, c, g, or t
  misc_feature (292)..(327): n is a, c, g, or t
cggtttcacggtgttgtggaagatcaaaggtggggaagcatggggtgggaaccntgtgttgtgtttcagaggcctcggtggggccntgtgttgtacttcttaccctctggggaatgccaaagnngtgagactgggctacttcctagtccctaagaaaaatgtgattgattctaagggctgatggttcagggctgactgcccgtggncaggctcggctgtccccgcagaagctgacccacagatgtctggtggttcccagcagctctaatccactcatcaccagaaccccacnnnnnnnnnnnnnnnnnnnnnnnnnnnnnnnnnnnnacccgcagctctggcaaaggacgataatgagctgcctctggatgaccaacactggagactctggc

SEQ ID NO: 4464 - DNA, 392 bp, Mus musculus; identical to SEQ ID NO: 4463
  misc_feature (54)..(54): n is a, c, g, or t
  misc_feature (86)..(86): n is a, c, g, or t
  misc_feature (123)..(124): n is a, c, g, or t
  misc_feature (206)..(206): n is a, c, g, or t
  misc_feature (292)..(327): n is a, c, g, or t

SEQ ID NO: 4465 - DNA, 391 bp, Mus musculus
  misc_feature (26)..(72): n is a, c, g, or t
  misc_feature (74)..(74): n is a, c, g, or t
  misc_feature (152)..(152): n is a, c, g, or t
  misc_feature (163)..(163): n is a, c, g, or t
tctgctgggcccagcctgtacatcannnnnnnnnnnnnnnnnnnnnnnnnnnnnnnnnnnnnnnnnnnnnnngntactccagcagtttccctgcacctctggctctcaccagcatcctctcagctgttctgtgccaaatacgtctgcacccntgggttcagcncaggggcccctcacctcggtgactaagcttcgcccaccttgttacgatgtcttatatatatacacactgctatttacagacctggccttggatcctgtgaccctctgggaagagtcctgccaaagtccaggacagcattggggctaaggcagaggcttttctctagaggcttgggccctgtcccaacgtggactttggggctaggaacctgggcttctctctgtgaat

SEQ ID NO: 4466 - DNA, 391 bp, Mus musculus; identical to SEQ ID NO: 4465
  misc_feature (26)..(72): n is a, c, g, or t
  misc_feature (74)..(74): n is a, c, g, or t
  misc_feature (152)..(152): n is a, c, g, or t
  misc_feature (163)..(163): n is a, c, g, or t

SEQ ID NO: 4467 - DNA, 476 bp, Mus musculus
  misc_feature (26)..(36): n is a, c, g, or t
  misc_feature (144)..(145): n is a, c, g, or t
  misc_feature (163)..(163): n is a, c, g, or t
cttccaagactgtgaagatgcccaannnnnnnnnnngtgtttcgtgatgctgtaatttattaatgtttgtagctttttatatttgtacatttcttatgaggtttgtttctacacccgttacccggatgtgttgtccacgagganntgcagcttggcggaggcnttatccactcccacttgacctgtttggagggacgccatccccagggcccggggctgggagaggggcatcgtgcaggccccaggcttactcagaactggtgtttttaaaagttttccttgaccctgtccttgtgaacatttctataatcttaacccgggcatcaagctgttctctctctctctctctctctctttctctttttaattttattattattttggcgacatgtacatttctaacaaagtttatcgtggctattaaagtgttctatttcccagttcatattactcttgtatcgagtccatgaggtcta

SEQ ID NO: 4468 - DNA, 476 bp, Mus musculus; identical to SEQ ID NO: 4467
  misc_feature (26)..(36): n is a, c, g, or t
  misc_feature (144)..(145): n is a, c, g, or t
  misc_feature (163)..(163): n is a, c, g, or t

SEQ ID NO: 4469 - DNA, 238 bp, Mus musculus
gctccaggcctgactggggtaagaaacatgcctccactttacagaggtagctatgggtttggaacactggacttgactatggggtgctgggagtcaagtctcagctttaccactaactagctgtgtggccttgagcaaatactattacttctctgagcctccgttacgccgtctgtaaaaagggaggtgaaaatacctacctcacagaactgttggctcagatgagacgctgtatgtg

SEQ ID NO: 4470 - DNA, 238 bp, Mus musculus; identical to SEQ ID NO: 4469

SEQ ID NO: 4471 - DNA, 286 bp, Mus musculus
  misc_feature (26)..(26): n is a, c, g, or t
  misc_feature (118)..(118): n is a, c, g, or t
ggcccaagcagaggttactggctttncaggcaaccctgaggaggcacaaatgcagaaccactcgctggagatgactctggagcagaaggttatgttcttgctgtgaccacctgtaggntcccccacacctttggagccttccacctcttctgcccactcctcaaactctcctggtatcaatagcctcctgggctgagctcgggggctaaggagctaccttcatgaaaagaggtggcaagagacagccagagccatgagaggagggataaatccacgggagaccaca

SEQ ID NO: 4472 - DNA, 286 bp, Mus musculus; identical to SEQ ID NO: 4471
  misc_feature (26)..(26): n is a, c, g, or t
  misc_feature (118)..(118): n is a, c, g, or t

SEQ ID NO: 4473 - DNA, 286 bp, Mus musculus; identical to SEQ ID NO: 4471
  misc_feature (26)..(26): n is a, c, g, or t
  misc_feature (118)..(118): n is a, c, g, or t

SEQ ID NO: 4474 - DNA, 214 bp, Mus musculus
ggatggattaaacacccccatgttaatcttttgttacaatacaacagcaataaagttgtgtaaatagttaacttttctaattaaagatctaatcactgatatagaataacaacaacttatgtttaatccagtgtgaaggaaaaatagaggaagtcttatttcctgaatgaatactttctatggagatttgttctattttgttgaagtaatgaag

SEQ ID NO: 4475 - DNA, 214 bp, Mus musculus; identical to SEQ ID NO: 4474

SEQ ID NO: 4476 - DNA, 204 bp, Mus musculus
tgaacaggtgaaatcccttaaagaattgggtggccacgtggccaacttacgcagggtgggtgcccctgaaactggcatggcagaatttttttttgacaagcaccccttgggacacggtggtggggggtaaggtgacttccccaaagccacgtgactttattggtcattggggcagtgcatgcatgtcagggtgccttcattttt

SEQ ID NO: 4477 - DNA, 204 bp, Mus musculus; identical to SEQ ID NO: 4476

SEQ ID NO: 4478 - DNA, 121 bp, Mus musculus
tccctccttcctttagggtagcgctttgtgtaatagggtgaaaattgttgttcccattcctaaaggttgattttcaatatctaacaggtataatggcatcttcggtaatctaagatttgtt

SEQ ID NO: 4479 - DNA, 121 bp, Mus musculus; identical to SEQ ID NO: 4478

SEQ ID NO: 4480 - DNA, 454 bp, Mus musculus
  misc_feature (95)..(95): n is a, c, g, or t
tccaagcctgaatagaaacagatagcattaaagtacttccttcccactcctttctctggctctctctcccccacttgttctgacttaggataatnatctctattttgtttgtttctcaagtgacttgtggacttgtgctgtataaactgtattaaaaaggctctgtttttaaagatcaattgtcattcctgtggggacagtggctactgagaaatctacattgtaagagaagacaatgaaagaccctggccctgtctctcaaaacttaactttctctgtatgattttttttttaaaaaaatattccatttattttactttgtggttacttgattttgaggaagaaaatattcagctttgtataaagactaggtatcagattccttttgcagtgggaggtgtatatatcgtattttggtatagagtaggacccaagcttcatgcatctgtatttg

SEQ ID NO: 4481 - DNA, 454 bp, Mus musculus; identical to SEQ ID NO: 4480
  misc_feature (95)..(95): n is a, c, g, or t

SEQ ID NO: 4482 - DNA, 562 bp, Mus musculus
  misc_feature (55)..(69): n is a, c, g, or t
  misc_feature (82)..(82): n is a, c, g, or t
  misc_feature (93)..(93): n is a, c, g, or t
  misc_feature (100)..(100): n is a, c, g, or t
  misc_feature (103)..(103): n is a, c, g, or t
  misc_feature (107)..(107): n is a, c, g, or t
  misc_feature (111)..(111): n is a, c, g, or t
  misc_feature (113)..(114): n is a, c, g, or t
  misc_feature (119)..(119): n is a, c, g, or t
  misc_feature (121)..(121): n is a, c, g, or t
  misc_feature (134)..(134): n is a, c, g, or t
  misc_feature (163)..(163): n is a, c, g, or t
  misc_feature (170)..(170): n is a, c, g, or t
  misc_feature (172)..(172): n is a, c, g, or t
  misc_feature (178)..(178): n is a, c, g, or t
  misc_feature (314)..(314): n is a, c, g, or t
  misc_feature (327)..(347): n is a, c, g, or t
cgacacgatggcagccaaactgcagcttcaaacactcacacttggctgagtttcnnnnnnnnnnnnnnngttatcatcgganccttcttgtgncctcaanggnccangggncnnagaangnggatcagaatgcntactgaactaattgggcagccatctcaangctgctntnggcaangggctgctgtagcacttttcttttagcaaattaatgactctctggcaaaggagtgtttaagtgaaggcattaataagggctctggcaggtattcccatgattctcagagttccatttgcattgaattaatcttaangaaacttgcaagnnnnnnnnnnnnnnnnnnnnnaaacatggcagattcagtgagtgaagtcctctcatccataaaatgaacacgagatacttgttttaaaattttttccctgtgggtaaaaatagaaaaatcagaatgcttataacaaaacataatttggtacaaaattcttcaaaatacttgtatccaactataaatatattcttcttgagataagtcacttacgattcttgctctgtttgttggtg

SEQ ID NO: 4483 - DNA, 562 bp, Mus musculus; identical to SEQ ID NO: 4482
  misc_feature (55)..(69): n is a, c, g, or t
  misc_feature (82)..(82): n is a, c, g, or t
  misc_feature (93)..(93): n is a, c, g, or t
  misc_feature (100)..(100): n is a, c, g, or t
  misc_feature (103)..(103): n is a, c, g, or t
  misc_feature (107)..(107): n is a, c, g, or t
  misc_feature (111)..(111): n is a, c, g, or t
  misc_feature (113)..(114): n is a, c, g, or t
  misc_feature (119)..(119): n is a, c, g, or t
  misc_feature (121)..(121): n is a, c, g, or t
  misc_feature (134)..(134): n is a, c, g, or t
  misc_feature (163)..(163): n is a, c, g, or t
  misc_feature (170)..(170): n is a, c, g, or t
  misc_feature (172)..(172): n is a, c, g, or t
  misc_feature (178)..(178): n is a, c, g, or t
  misc_feature (314)..(314): n is a, c, g, or t
  misc_feature (327)..(347): n is a, c, g, or t

SEQ ID NO: 4484 - DNA, 282 bp, Mus musculus
  misc_feature (152)..(152): n is a, c, g, or t
  misc_feature (194)..(194): n is a, c, g, or t
atgccaatcacagtataaacttggatgttgttactccccagttgcctggttccactcaaataaatataaaaattctaatatagtttacataaatacatttaactcaagaacacatgtagatataaagacagaaccttcaaccacaaacctgntaatattttccaaaactttaagagtgattatgtgcttcctcnccatacaatgatttttggtgtctataaaattataccctagaactaaaaattccaaaaagccaagacgccttcatagtcaaactactag

SEQ ID NO: 4485 - DNA, 282 bp, Mus musculus; identical to SEQ ID NO: 4484
  misc_feature (152)..(152): n is a, c, g, or t
  misc_feature (194)..(194): n is a, c, g, or t

SEQ ID NO: 4486 - DNA, 578 bp, Mus musculus
  misc_feature (141)..(141): n is a, c, g, or t
  misc_feature (197)..(197): n is a, c, g, or t
  misc_feature (372)..(372): n is a, c, g, or t
  misc_feature (542)..(542): n is a, c, g, or t
ttgaccttcctgacatgtgtttaatattcctcctgcttttacagattctgacgttttcttgataattgtaagcttgagagtgtttgtggaagaacttactttcttcttatgtatacataattaaatgaaaagtcttcatanggagtttgacaaaatgaattgtggttataaaacgaatttgcttttttgttgttttntttttcttttttggcctaaggaagaaagctgtgataaatttcaaatttgcatagcttttcaatgttttgctctgctcccgctcttgcttcagagtcggcacactcacctgcatttgagttctgtctatagcccagcaggctgcctgtttaaaatcccatcatgaatttaacaggntgatgtgagaatgaaatagatattactggggttttgttgttgtttgtttatttgttttgcttttattaccaagaggtgctttttaataaatggatattgaagttagggtgttactaatttgatgtatggtttcacagtctagcatactgtcctttgacatctgcctttangacttggctgagtgtctcattagtttatcatcacag

SEQ ID NO: 4487 - DNA, 578 bp, Mus musculus; identical to SEQ ID NO: 4486
  misc_feature (141)..(141): n is a, c, g, or t
  misc_feature (197)..(197): n is a, c, g, or t
  misc_feature (372)..(372): n is a, c, g, or t
  misc_feature (542)..(542): n is a, c, g, or t

SEQ ID NO: 4488 - DNA, 230 bp, Mus musculus
ctgacaagctttttgagtttggaacttattttccaatttgagaagttataatatatctttgtatttaagatatttactgctttgtttgtgccttgaagcttcgatgggtttaaggatcacagaggggccaggatactaacgagggctggtttatttgcaaacctgaatacttgtgttgtggtttctccaggacaatttttttattattatttctactgaacatggagcca

SEQ ID NO: 4489 - DNA, 230 bp, Mus musculus; identical to SEQ ID NO: 4488

SEQ ID NO: 4490 - DNA, 403 bp, Mus musculus
gtctcacagtcttgcttgttccttccaacatctcttgagatgcaccctgctctcagtaactcgtgctgttcctgagggactcttgtgtttccctgaaatgactctcttctagaatcaggctctgcctgccccaaggtggctaaccttcccacttccatggctcccctggttagtccctataggtctgatgctccgcccacttgcccacttccctgtcatggtcacctttaggagaaagcatgctggctgagtcgcccaagcctgatgctggttttggctctggactcggaatgcagcctgctcacagcgccctgatgccctccgtgacacacatacccacccctccacatagaacacaagtcccccggtgcatgcaccatgcccactgcctttctttgcactg

SEQ ID NO: 4491 - DNA, 403 bp, Mus musculus; identical to SEQ ID NO: 4490

SEQ ID NO: 4492 - DNA, 426 bp, Mus musculus
  misc_feature (253)..(253): n is a, c, g, or t
tgggcccaggtatcatatacactgtgtcatctgaaaatggaccgtgtcgcctttggaaagatacatgtcttcctgtgtctttccacctgaaatcagctacatatatgcctccttttacacattcagaagtacctctaactaaagactatgatttgtgcatgagtgtgctataactaccttgtacatggaaagatttctcattctgtttctagttttatttaaagtagcccttctctaacaataatagtttctngctaaaaatcagtataacttataaatggtctcaaatgtttgtgtaagttacgcattgttattgatttcattcttatgtaacagaaaaataagctgagttgtgttcatggaaaggactcccttagaagaatgagaaaacacaatcatgaaatactgatttgttgcctaggtaca

SEQ ID NO: 4493 - DNA, 426 bp, Mus musculus; identical to SEQ ID NO: 4492
  misc_feature (253)..(253): n is a, c, g, or t

SEQ ID NO: 4494 - DNA, 523 bp, Mus musculus
  misc_feature (62)..(62): n is a, c, g, or t
  misc_feature (94)..(94): n is a, c, g, or t
  misc_feature (127)..(127): n is a, c, g, or t
  misc_feature (191)..(191): n is a, c, g, or t
  misc_feature (201)..(201): n is a, c, g, or t
  misc_feature (237)..(237): n is a, c, g, or t
  misc_feature (249)..(250): n is a, c, g, or t
cactataagctttaagtaggcaaatctactcatttcttccttcatggtttctgggttccagnaatgctacaccaggctactctgggccctaganacattactcatacacatatacatacactcatanatgcacacacacatatacatgtacacacatatatgtgtatacacacatatatacacacactctnaaattgtttnctctacatggaatttattttgtttcaaatgtttaangctatttgttcnnccaaatgtcaattctataaagtctgctttttaaagaattcattctttctcaattatatgaaatacattggccaaattatcaatgtaatttaagaaactggttatgacaaagagttaaagatgtcagagaaagtaatcctacaaaggaaattctagacatatttcatgacactaagagagcaaagtatcaaatgtctgacatccatccagaattagaagggactagaaggactccccacaccagggacaacacttgccctgcatctcaggagag

SEQ ID NO: 4495 - DNA, 523 bp, Mus musculus; identical to SEQ ID NO: 4494
  misc_feature (62)..(62): n is a, c, g, or t
  misc_feature (94)..(94): n is a, c, g, or t
  misc_feature (127)..(127): n is a, c, g, or t
  misc_feature (191)..(191): n is a, c, g, or t
  misc_feature (201)..(201): n is a, c, g, or t
  misc_feature (237)..(237): n is a, c, g, or t
  misc_feature (249)..(250): n is a, c, g, or t

SEQ ID NO: 4496 - DNA, 435 bp, Mus musculus
  misc_feature (36)..(36): n is a, c, g, or t
gtcgacatgagctcatctggtattcattatgtacantgaagtccttaaacaagatgaaactgtatagctaatgacataaaatgcttcctccttatctaatcaggaaactatcttgagtttctagattagatgttattcagaaaggataatatagggaataattactctgtatttcattggaagaatttgccacatggtctgtaagtcacattgcatatgaaaataaaaatcaagagcagtctttagtagtttcgtaagaatatgatacttttgttttttttttttaagcttgcatataaaatatgatatgtagtgtgtagcaactttgtggtgttggttcatttgtcagttttgtttggccattacaaaattttagagtttaaatttagtaacaggaggcagtgtaactgattcatgcaggctgtatacgtgttg

SEQ ID NO: 4497 - DNA, 435 bp, Mus musculus; identical to SEQ ID NO: 4496
  misc_feature (36)..(36): n is a, c, g, or t

SEQ ID NO: 4498 - DNA, 217 bp, Mus musculus
  misc_feature (26)..(60): n is a, c, g, or t
caggatcatacatctatgaggagttnnnnnnnnnnnnnnnnnnnnnnnnnnnnnnnnnnncagtggggccagattatgcccatgctgaagctagaaagtctccagctttggatgggaaggttgaacgagacagtgaggggaaagaggttcgatatccagtcatgttgaccgccatggaaaagctggtggccaggaaggtctgcgtagcttttaagca

SEQ ID NO: 4499 - DNA, 217 bp, Mus musculus; identical to SEQ ID NO: 4498
  misc_feature (26)..(60): n is a, c, g, or t

SEQ ID NO: 4500 - DNA, 211 bp, Mus musculus
caaacagtttgtggatttgaccttcttcgggccaatggtcactcttttgtgtgtgacgtcaatggctttagctttgtcaagaactcgatgaagtactatgatgactgtgccaagattctggggtaagagacacagtggactagagcatgggctataggattggggaacttcctctgtgtaaaccgtgcctgctgtcccagcacggtagagg

SEQ ID NO: 4501 - DNA, 211 bp, Mus musculus; identical to SEQ ID NO: 4500

SEQ ID NO: 4502 - DNA, 349 bp, Mus musculus
  misc_feature (280)..(307): n is a, c, g, or t
gcgtttcctggctatcttctcccttcctgcattcctggccactctgccccccaacagcatccccaccaccctgtcaccagacgtggctgtggtttctgagagtgacagtgaagacctcggtgacttggagctcaaggatagggctagacagttggactgcatggcctgcagagtgcaagcaagcccagcagccccagaccctgtacagagagctccaagtcctggtgaggtttctgctccctcccctctggatgcttctgatggccttgatgaccttaannnnnnnnnnnnnnnnnnnnnnnnnnnntcccggagatagaggttgctttgagcagcaaggacaaggcgt

SEQ ID NO: 4503 - DNA, 349 bp, Mus musculus; identical to SEQ ID NO: 4502
  misc_feature (280)..(307): n is a, c, g, or t

SEQ ID NO: 4504 - DNA, 553 bp, Mus musculus
  misc_feature (39)..(70): n is a, c, g, or t
  misc_feature (126)..(126): n is a, c, g, or t
  misc_feature (134)..(148): n is a, c, g, or t
  misc_feature (249)..(249): n is a, c, g, or t
cagatggttgtcagctgccctttgtgttctgggaatcannnnnnnnnnnnnnnnnnnnnnnnnnnnnnnncctaactgctgagccatctcttcatccttgtcgtttaagcttttaaaaacgtgtancccttttnnnnnnnnnnnnnnnaaattctttcatctgtgtacacatgctactagactgttttttaggtcgaaggaaacatagaagtagttgttagaaggacaccagaactgaatctagttctnatctagttcctatggtttacttgaagatacagattaaacttctgtattaaacttcagtttgtttttttctgatctttgaaatttgattccattaagtaagatttcttcttttaaatgtttttcttaactgactagatagtatatgtttaacttattgtttgtcttgactatcctgacaatacttatatcatcttcaccctgctttccagtccttcttgtgtaagtgaggtctggtaaccacaagtgttctgaagtccatctcttttctcacctctaaaatgagtgagtgctccactcatttaac

SEQ ID NO: 4505 - DNA, 553 bp, Mus musculus; identical to SEQ ID NO: 4504
  misc_feature (39)..(70): n is a, c, g, or t
  misc_feature (126)..(126): n is a, c, g, or t
  misc_feature (134)..(148): n is a, c, g, or t
  misc_feature (249)..(249): n is a, c, g, or t

SEQ ID NO: 4506 - DNA, 415 bp, Mus musculus
  misc_feature (47)..(47): n is a, c, g, or t
  misc_feature (49)..(49): n is a, c, g, or t
  misc_feature (53)..(53): n is a, c, g, or t
  misc_feature (59)..(59): n is a, c, g, or t
  misc_feature (62)..(64): n is a, c, g, or t
  misc_feature (75)..(75): n is a, c, g, or t
  misc_feature (77)..(80): n is a, c, g, or t
  misc_feature (82)..(82): n is a, c, g, or t
  misc_feature (84)..(84): n is a, c, g, or t
  misc_feature (86)..(86): n is a, c, g, or t
  misc_feature (91)..(92): n is a, c, g, or t
  misc_feature (98)..(98): n is a, c, g, or t
  misc_feature (102)..(102): n is a, c, g, or t
  misc_feature (126)..(127): n is a, c, g, or t
  misc_feature (133)..(133): n is a, c, g, or t
  misc_feature (143)..(143): n is a, c, g, or t
  misc_feature (148)..(149): n is a, c, g, or t
  misc_feature (158)..(158): n is a, c, g, or t
  misc_feature (183)..(183): n is a, c, g, or t
  misc_feature (192)..(192): n is a, c, g, or t
  misc_feature (197)..(197): n is a, c, g, or t
  misc_feature (213)..(213): n is a, c, g, or t
  misc_feature (226)..(226): n is a, c, g, or t
  misc_feature (235)..(235): n is a, c, g, or t
  misc_feature (243)..(243): n is a, c, g, or t
  misc_feature (256)..(256): n is a, c, g, or t
  misc_feature (260)..(260): n is a, c, g, or t
  misc_feature (270)..(270): n is a, c, g, or t
  misc_feature (285)..(285): n is a, c, g, or t
  misc_feature (290)..(290): n is a, c, g, or t
  misc_feature (349)..(350): n is a, c, g, or t
ggcagttatctcagggtggcttcttcctatgccctcagtgtggtcangngagnccaccnagnnnttttattaccnannnntngngnagccnntacccngatnccaggagtccaatatgttaccttnntttcangggattcccnccccnnacttcctcnggctttcaaagcctctgcccagtcntcttccctnagagnaggtcctttactcccnggctgcccatgtngtgaccccngagcattntggcatcacagancccngcagacactncccgaaatctcttgnaaagnccccacttaatggaggatggacttgggacgggggtagggtggggaaacaggttcactgnncacacacacacacacacacaccccatattgtttcctctcaagagctggtaacaccgtcccataaa

SEQ ID NO: 4507 - DNA, 415 bp, Mus musculus; identical to SEQ ID NO: 4506
  misc_feature (47)..(47): n is a, c, g, or t
  misc_feature (49)..(49): n is a, c, g, or t
  misc_feature (53)..(53): n is a, c, g, or t
  misc_feature (59)..(59): n is a, c, g, or t
  misc_feature (62)..(64): n is a, c, g, or t
  misc_feature (75)..(75): n is a, c, g, or t
  misc_feature (77)..(80): n is a, c, g, or t
  misc_feature (82)..(82): n is a, c, g, or t
  misc_feature (84)..(84): n is a, c, g, or t
  misc_feature (86)..(86): n is a, c, g, or t
  misc_feature (91)..(92): n is a, c, g, or t
  misc_feature (98)..(98): n is a, c, g, or t
  misc_feature (102)..(102): n is a, c, g, or t
  misc_feature (126)..(127): n is a, c, g, or t
  misc_feature (133)..(133): n is a, c, g, or t
  misc_feature (143)..(143): n is a, c, g, or t
  misc_feature (148)..(149): n is a, c, g, or t
  misc_feature (158)..(158): n is a, c, g, or t
  misc_feature (183)..(183): n is a, c, g, or t
  misc_feature (192)..(192): n is a, c, g, or t
  misc_feature (197)..(197): n is a, c, g, or t
  misc_feature (213)..(213): n is a, c, g, or t
  misc_feature (226)..(226): n is a, c, g, or t
  misc_feature (235)..(235): n is a, c, g, or t
  misc_feature (243)..(243): n is a, c, g, or t
  misc_feature (256)..(256): n is a, c, g, or t
  misc_feature (260)..(260): n is a, c, g, or t
  misc_feature (270)..(270): n is a, c, g, or t
  misc_feature (285)..(285): n is a, c, g, or t
  misc_feature (290)..(290): n is a, c, g, or t
  misc_feature (349)..(350): n is a, c, g, or t

SEQ ID NO: 4508 - DNA, 415 bp, Mus musculus; identical to SEQ ID NO: 4506
  misc_feature (47)..(47): n is a, c, g, or t
  misc_feature (49)..(49): n is a, c, g, or t
  misc_feature (53)..(53): n is a, c, g, or t
  misc_feature (59)..(59): n is a, c, g, or t
  misc_feature (62)..(64): n is a, c, g, or t
  misc_feature (75)..(75): n is a, c, g, or t
  misc_feature (77)..(80): n is a, c, g, or t
  misc_feature (82)..(82): n is a, c, g, or t
  misc_feature (84)..(84): n is a, c, g, or t
  misc_feature (86)..(86): n is a, c, g, or t
  misc_feature (91)..(92): n is a, c, g, or t
  misc_feature (98)..(98): n is a, c, g, or t
  misc_feature (102)..(102): n is a, c, g, or t
  misc_feature (126)..(127): n is a, c, g, or t
  misc_feature (133)..(133): n is a, c, g, or t
  misc_feature (143)..(143): n is a, c, g, or t
  misc_feature (148)..(149): n is a, c, g, or t
  misc_feature (158)..(158): n is a, c, g, or t
  misc_feature (183)..(183): n is a, c, g, or t
  misc_feature (192)..(192): n is a, c, g, or t
  misc_feature (197)..(197): n is a, c, g, or t
  misc_feature (213)..(213): n is a, c, g, or t
  misc_feature (226)..(226): n is a, c, g, or t
  misc_feature (235)..(235): n is a, c, g, or t
  misc_feature (243)..(243): n is a, c, g, or t
  misc_feature (256)..(256): n is a, c, g, or t
  misc_feature (260)..(260): n is a, c, g, or t
  misc_feature (270)..(270): n is a, c, g, or t
  misc_feature (285)..(285): n is a, c, g, or t
  misc_feature (290)..(290): n is a, c, g, or t
  misc_feature (349)..(350): n is a, c, g, or t

SEQ ID NO: 4509 - DNA, 456 bp, Mus musculus
  misc_feature (102)..(102): n is a, c, g, or t
  misc_feature (172)..(172): n is a, c, g, or t
  misc_feature (331)..(331): n is a, c, g, or t
  misc_feature (346)..(348): n is a, c, g, or t
  misc_feature (350)..(350): n is a, c, g, or t
aagcagcctaagaaatgtggcagctgtaaatggacgtgtactctcacttcatgttgctgcagaagtggtgggcctgagtggttttattttctattttttatntaattgaagacttaaaattaggcaaattaaggccttttaaaccattttacataggttaaacaagttgctnaacagggccaaacttgaacaagaacagaggtgcttatttatatatgtacctcccactaccctccctttgccctatagaattagagtttgattaaagtgtgaaaagtatggcttagggagtcctataataccttacacaaaggtgtcatgattaaaattntattttatgagggannnantttgtaaggatcctgtcatttttctgtacccaaggattgaacctaggactttaacagttatggatgtgttttaccgagcctcatcaccatgggtaactgactgcat

SEQ ID NO: 4510 - DNA, 456 bp, Mus musculus; identical to SEQ ID NO: 4509
  misc_feature (102)..(102): n is a, c, g, or t
  misc_feature (172)..(172): n is a, c, g, or t
  misc_feature (331)..(331): n is a, c, g, or t
  misc_feature (346)..(348): n is a, c, g, or t
  misc_feature (350)..(350): n is a, c, g, or t

SEQ ID NO: 4511 - DNA, 383 bp, Mus musculus
  misc_feature (153)..(154): n is a, c, g, or t
  misc_feature (261)..(294): n is a, c, g, or t
acctcgtcctcgtcggtgctgtactcctccattgtctctccactgacaaagtggatgaccctcctcgggactttcttcttcttccccatgacgcccagttctacattctcaaatcctctttcattacttatctgccgtgtcgcgtctcggaannccgtggcgaaggtatcgttagtgagtaattactgaagcggtgttaagtgtaagggaactggtacaattatgtagaaccgtgcaatggatagaaccgcagtcctcaannnnnnnnnnnnnnnnnnnnnnnnnnnnnnnnnnaagaattatgcccagtttttctttagagggtgaatacgaggttggtgtgtgcgtgattgcacaaaatgatgcactaggaactaacacat

SEQ ID NO: 4512 - DNA, 383 bp, Mus musculus; identical to SEQ ID NO: 4511
  misc_feature (153)..(154): n is a, c, g, or t
  misc_feature (261)..(294): n is a, c, g, or t

SEQ ID NO: 4513 - DNA, 357 bp, Mus musculus
  misc_feature (28)..(29): n is a, c, g, or t
  misc_feature (206)..(220): n is a, c, g, or t
cttcaggctaagagacagtgctgcgtanntgtgttgtttcctgttatgagcattggaaattgggttctccttctgtgagcatggagttgaatggaatgcccaccaggccgagtcttcttagatgactgagcactgcttgatgttgtgttttgaataatttaatctgtacaataaatacagtataggctgatcaaggagcattttgnnnnnnnnnnnnnnnctatataatggacaatctttattctgttctttagtataacagcaagtataattatgccgagtcctgccatcataagtatggagtaagctaaaggatgaccgttatgcccgtgtagacatagtgtactcagcagatgt

SEQ ID NO: 4514 - DNA, 357 bp, Mus musculus; identical to SEQ ID NO: 4513
  misc_feature (28)..(29): n is a, c, g, or t
  misc_feature (206)..(220): n is a, c, g, or t

SEQ ID NO: 4515 - DNA, 514 bp, Mus musculus
  misc_feature (54)..(54): n is a, c, g, or t
  misc_feature (59)..(60): n is a, c, g, or t
  misc_feature (84)..(84): n is a, c, g, or t
  misc_feature (90)..(90): n is a, c, g, or t
  misc_feature (94)..(94): n is a, c, g, or t
  misc_feature (107)..(107): n is a, c, g, or t
  misc_feature (109)..(109): n is a, c, g, or t
  misc_feature (111)..(113): n is a, c, g, or t
  misc_feature (123)..(124): n is a, c, g, or t
  misc_feature (130)..(131): n is a, c, g, or t
  misc_feature (144)..(144): n is a, c, g, or t
  misc_feature (146)..(146): n is a, c, g, or t
  misc_feature (150)..(159): n is a, c, g, or t
  misc_feature (166)..(166): n is a, c, g, or t
  misc_feature (170)..(170): n is a, c, g, or t
  misc_feature (187)..(187): n is a, c, g, or t
  misc_feature (196)..(196): n is a, c, g, or t
  misc_feature (200)..(201): n is a, c, g, or t
  misc_feature (205)..(205): n is a, c, g, or t
  misc_feature (213)..(213): n is a, c, g, or t
  misc_feature (226)..(261): n is a, c, g, or t
  misc_feature (263)..(264): n is a, c, g, or t
  misc_feature (268)..(270): n is a, c, g, or t
  misc_feature (273)..(279): n is a, c, g, or t
  misc_feature (281)..(285): n is a, c, g, or t
  misc_feature (288)..(290): n is a, c, g, or t
  misc_feature (292)..(292): n is a, c, g, or t
  misc_feature (294)..(295): n is a, c, g, or t
  misc_feature (297)..(298): n is a, c, g, or t
  misc_feature (308)..(308): n is a, c, g, or t
  misc_feature (375)..(392): n is a, c, g, or t
  misc_feature (454)..(454): n is a, c, g, or t
tcagtgctgatgtcccatgtcccactttctgtcagtgcaagggctcgaactcanttcannagctcctccagaagtccccagagnagcgtnctangggcaggagaacngnannncgaggagatnnaggttnnaccattcttcagnanccannnnnnnnnngccttgntggnccgcaccgtccagcctnccttcgtgnctannctcngtggcccngcagaccttcgtnnnnnnnnnnnnnnnnnnnnnnnnnnnnnnnnnnnncnnaccnnnccnnnnnnncnnnnntcnnncncnncnngccaacaggntgccttccgggactttgacttcgtgtctgagcagttcctggagtcctgagggtctcctggcacttcnnnnnnnnnnnnnnnnnnctccacgtaaccatgtgcctgggccgaagtatttaatgagtgtgtgggagtccaggcagtgnccgtccgtggggctgccgttgcaggcttttccttcgtgtccctgctgtgtctataactct

SEQ ID NO: 4516 - DNA, 514 bp, Mus musculus; identical to SEQ ID NO: 4515
  misc_feature (54)..(54): n is a, c, g, or t
  misc_feature (59)..(60): n is a, c, g, or t
  misc_feature (84)..(84): n is a, c, g, or t
  misc_feature (90)..(90): n is a, c, g, or t
  misc_feature (94)..(94): n is a, c, g, or t
  misc_feature (107)..(107): n is a, c, g, or t
  misc_feature (109)..(109): n is a, c, g, or t
  misc_feature (111)..(113): n is a, c, g, or t
  misc_feature (123)..(124): n is a, c, g, or t
  misc_feature (130)..(131): n is a, c, g, or t
  misc_feature (144)..(144): n is a, c, g, or t
  misc_feature (146)..(146): n is a, c, g, or t
  misc_feature (150)..(159): n is a, c, g, or t
  misc_feature (166)..(166): n is a, c, g, or t
  misc_feature (170)..(170): n is a, c, g, or t
  misc_feature (187)..(187): n is a, c, g, or t
  misc_feature (196)..(196): n is a, c, g, or t
  misc_feature (200)..(201): n is a, c, g, or t
  misc_feature (205)..(205): n is a, c, g, or t
  misc_feature (213)..(213): n is a, c, g, or t
  misc_feature (226)..(261): n is a, c, g, or t
  misc_feature (263)..(264): n is a, c, g, or t
  misc_feature (268)..(270): n is a, c, g, or t
  misc_feature (273)..(279): n is a, c, g, or t
  misc_feature (281)..(285): n is a, c, g, or t
  misc_feature (288)..(290): n is a, c, g, or t
  misc_feature (292)..(292): n is a, c, g, or t
  misc_feature (294)..(295): n is a, c, g, or t
  misc_feature (297)..(298): n is a, c, g, or t
  misc_feature (308)..(308): n is a, c, g, or t
  misc_feature (375)..(392): n is a, c, g, or t
  misc_feature (454)..(454): n is a, c, g, or t

SEQ ID NO: 4517 - DNA, 605 bp, Mus musculus
  misc_feature (29)..(30): n is a, c, g, or t
  misc_feature (266)..(267): n is a, c, g, or t
  misc_feature (269)..(272): n is a, c, g, or t
tcacagagagccaggctccatggggagcnntctaagttcttttcttttggaagattgggtgtctcggagagttgccatatctccttgtgtgaattgcgtgcttggaagcaatttttaaagggagtggaaagcttagggaaatcgtttgtatttggagtcttgctgtgtctggtattggaggtgtggacaccttgagtctgggtgagttgctgctggctgagccctcctggcaggcagggagagaagacgcctgggcctctccattnntnnnntcccacctcattgtgtaccatgaggggtccttgggaaatgtcttacctcttgtgttgaatggagacctgggttgagatgtgtctgctcttgtaggaagatcttttgtatcaggaacatgtacactaggccctgttcccgtccacaagctgagccatatgtacataagctagactgttttcttaggtgtgcacttttatagtctgtttttgaagattaacacatttgcaaggtgattgacaccatctttgcctaaatgcagtgagtgtacaggaagctcgttctcgagacagtacatacaaatccggagggggtcacatagactaagggccaga

SEQ ID NO: 4518 - DNA, 605 bp, Mus musculus; identical to SEQ ID NO: 4517
  misc_feature (29)..(30): n is a, c, g, or t
  misc_feature (266)..(267): n is a, c, g, or t
  misc_feature (269)..(272): n is a, c, g, or t

SEQ ID NO: 4519 - DNA, 372 bp, Mus musculus
  misc_feature (94)..(94): n is a, c, g, or t
  misc_feature (135)..(135): n is a, c, g, or t
  misc_feature (137)..(138): n is a, c, g, or t
  misc_feature (140)..(141): n is a, c, g, or t
  misc_feature (144)..(147): n is a, c, g, or t
  misc_feature (158)..(158): n is a, c, g, or t
  misc_feature (177)..(177): n is a, c, g, or t
ttacctaagcactggggtcccccagctccagatgtttaccccaagctcagggctactctgcacaccccgggcttcattcttctctagaaacatngggagagtcccgggtgaggcttccagacttccataaagttntnncnncannnngaaggattccntgtagggtggctaaggacngacgtgggtctcacgggatattgtcacagcttggcatccatccttcggagacacacacagccctttctgcccactcccatctgtgtggtggccttcccagggtcccttggatataagccagagtgttggagtagacaaagaagataaataaggaggttctcactccacagagatgctaggttgttttactcttcc

SEQ ID NO: 4520 - DNA, 372 bp, Mus musculus; identical to SEQ ID NO: 4519
  misc_feature (94)..(94): n is a, c, g, or t
  misc_feature (135)..(135): n is a, c, g, or t
  misc_feature (137)..(138): n is a, c, g, or t
  misc_feature (140)..(141): n is a, c, g, or t
  misc_feature (144)..(147): n is a, c, g, or t
  misc_feature (158)..(158): n is a, c, g, or t
  misc_feature (177)..(177): n is a, c, g, or t

SEQ ID NO: 4521 - DNA, 517 bp, Mus musculus
  misc_feature (376)..(376): n is a, c, g, or t
  misc_feature (392)..(392): n is a, c, g, or t
  misc_feature (412)..(436): n is a, c, g, or t
  misc_feature (462)..(462): n is a, c, g, or t
  misc_feature (464)..(464): n is a, c, g, or t
gattgacatcccagaacagaacgcaattcctgataatagccaatatcaagaccaggaacaaatagttactttacaggctttatttccttcaacagaaacatctgaaaatagcatgattgacacctcggaatcacagcaggagtcttctgatttatgtaccgaatcttctgattcatctaccgagtcttctgacctatctacggacccttaaagctgacatgttagctcaagatctctgtgcagttcaaaatgttgcaaaatctcaaagatagaaaaaaccacatataatactaataacgcacatgttaacatgcatatatttgtatatgttttacatattacaaataatgtttaaatttcctaggctttgactttnttaaacatttggaatntcatatattcaaaaagtaannnnnnnnnnnnnnnnnnnnnnnnngaatttatcaaacagacaaacataananaaaaaaaaaatcagtgcttcataccactgcatgaatctaatgttctggactga

SEQ ID NO: 4522 - DNA, 517 bp, Mus musculus; identical to SEQ ID NO: 4521
  misc_feature (376)..(376): n is a, c, g, or t
  misc_feature (392)..(392): n is a, c, g, or t
  misc_feature (412)..(436): n is a, c, g, or t
  misc_feature (462)..(462): n is a, c, g, or t
  misc_feature (464)..(464): n is a, c, g, or t

SEQ ID NO: 4523 - DNA, 282 bp, Mus musculus
  misc_feature (26)..(46): n is a, c, g, or t
  misc_feature (142)..(142): n is a, c, g, or t
  misc_feature (155)..(155): n is a, c, g, or t
ggtcattctctgctgggcctgccatnnnnnnnnnnnnnnnnnnnnntctctctcggaatccagtcccaactccagccctggcccctgtcctgagaaggcgccaccaccccagaagcccagccatgaaggcagctacctgctncagccctgaaggngtctggcctagcctggagtcctggacctgagtatacctgagtcagagcgtggaatcggatccaagaagtcagtcggcctggggtccagtcgatttgacactggacccagcagcctagattgtagcca

SEQ ID NO: 4524 - DNA, 282 bp, Mus musculus; identical to SEQ ID NO: 4523
  misc_feature (26)..(46): n is a, c, g, or t
  misc_feature (142)..(142): n is a, c, g, or t
  misc_feature (155)..(155): n is a, c, g, or t

SEQ ID NO: 4525 - DNA, 491 bp, Mus musculus
  misc_feature (165)..(182): n is a, c, g, or t
  misc_feature (188)..(190): n is a, c, g, or t
  misc_feature (208)..(209): n is a, c, g, or t
  misc_feature (305)..(306): n is a, c, g, or t
  misc_feature (311)..(311): n is a, c, g, or t
  misc_feature (313)..(313): n is a, c, g, or t
  misc_feature (317)..(317): n is a, c, g, or t
  misc_feature (326)..(326): n is a, c, g, or t
  misc_feature (335)..(335): n is a, c, g, or t
  misc_feature (349)..(349): n is a, c, g, or t
  misc_feature (356)..(356): n is a, c, g, or t
  misc_feature (358)..(358): n is a, c, g, or t
  misc_feature (380)..(381): n is a, c, g, or t
  misc_feature (391)..(391): n is a, c, g, or t
  misc_feature (403)..(403): n is a, c, g, or t
  misc_feature (440)..(440): n is a, c, g, or t
gaccctggccccttgcaagttctgggccaagacttgtattcaatcgagtaaacggccggcgacccctcaccacctccccatccctcgaggggacccaagagacctacacagtggcccacgaggagaacgtccgatttgtgtccgaagcctggcagcaggtagagnnnnnnnnnnnnnnnnnncctgcnnntgagagtggcccacggcnngtgcagtatgtggagagcactcctgatccccggctacagaactttgtacctattgacctcgatgagtggtgggcacagcagtttctggctaaaatnnccaantnttcntagcagctntccgggaangaatgttgccatantggaccntntgccagaagaggaccatggtgnnccgatccacnttgtggcctggntgggtaccggccacacctgaagtgccaacatttgganttttgcacctgttgttcccttggcttggctgtcccaagctgccagagccag

SEQ ID NO: 4526 - DNA, 491 bp, Mus musculus; identical to SEQ ID NO: 4525
  misc_feature (165)..(182): n is a, c, g, or t
  misc_feature (188)..(190): n is a, c, g, or t
  misc_feature (208)..(209): n is a, c, g, or t
  misc_feature (305)..(306): n is a, c, g, or t
  misc_feature (311)..(311): n is a, c, g, or t
  misc_feature (313)..(313): n is a, c, g, or t
  misc_feature (317)..(317): n is a, c, g, or t
  misc_feature (326)..(326): n is a, c, g, or t
  misc_feature (335)..(335): n is a, c, g, or t
  misc_feature (349)..(349): n is a, c, g, or t
  misc_feature (356)..(356): n is a, c, g, or t
  misc_feature (358)..(358): n is a, c, g, or t
  misc_feature (380)..(381): n is a, c, g, or t
  misc_feature (391)..(391): n is a, c, g, or t
  misc_feature (403)..(403): n is a, c, g, or t
  misc_feature (440)..(440): n is a, c, g, or t

SEQ ID NO: 4527 - DNA, 513 bp, Mus musculus
  misc_feature (57)..(57): n is a, c, g, or t
  misc_feature (177)..(177): n is a, c, g, or t
  misc_feature (351)..(351): n is a, c, g, or t
  misc_feature (375)..(375): n is a, c, g, or t
  misc_feature (382)..(382): n is a, c, g, or t
  misc_feature (384)..(385): n is a, c, g, or t
  misc_feature (465)..(465): n is a, c, g, or t
tagcttcctggaagcagaaccaagaagccagaaggttcttcctagggtggccttggntccctgaaggaatctgaaatgctgaccctgtcacaacctcccagcacagctttggaatgagacatcagcctggcctccagcagagcagaggctctggagctccacatcctgcctgcaggnagccctcagggtgccctccagagtacagggagaaactaaaggcaataacagaagctgctctcagagcctgactgtgcacaaaacactagtgaagcctgctgaactaattctgcctctggaaatcttttctggttctttacagtttgttgttttgttttgatccaagcttagttngttactatgtgtgatttagcatcngtcgcantnntgtaaatatggagtaagtattgtaaactatttaattgctgcgattgttgggttatacatacatttaggactgcaattttntggtattttttgtattgtaaaataacagctaatttcatcaggaacaag

SEQ ID NO: 4528 - DNA, 513 bp, Mus musculus; identical to SEQ ID NO: 4527
  misc_feature (57)..(57): n is a, c, g, or t
  misc_feature (177)..(177): n is a, c, g, or t
  misc_feature (351)..(351): n is a, c, g, or t
  misc_feature (375)..(375): n is a, c, g, or t
  misc_feature (382)..(382): n is a, c, g, or t
  misc_feature (384)..(385): n is a, c, g, or t
  misc_feature (465)..(465): n is a, c, g, or t

SEQ ID NO: 4529 - DNA, 402 bp, Mus musculus
  misc_feature (235)..(235): n is a, c, g, or t
  misc_feature (281)..(281): n is a, c, g, or t
catcactggatatagtggagacagaaaaagctgttacatgtactgtccaatgaaatattaccctatctacttttcaaagttttttgtgctttactgtctagtgctaataattaaatattgtcttatagcttcaatgttatggctgattttttttaaagatgtgtttgcaataaactgaagaattgttttacccctttgtggaaggcaacaatagaattattaagatattaaactnttctgatatgtcaatctttagttaggtttttcccccttctctttcntactttgcttatgtgtaatatttacattaaaggaggattttgtaatgaaatactacgcgactaaaacactttccctttctctaatgtctgcagtttttgaaacgtctccttgtacgttcta

SEQ ID NO: 4530 - DNA, 402 bp, Mus musculus; identical to SEQ ID NO: 4529
  misc_feature (235)..(235): n is a, c, g, or t
  misc_feature (281)..(281): n is a, c, g, or t

SEQ ID NO: 4531 - DNA, 134 bp, Mus musculus
  misc_feature (79)..(93): n is a, c, g, or t
ctggaccaggggtcatggctccccagaacttgccctccatccagattgtgcagactcttcctgcagtccaactggtacnnnnnnnnnnnnnnnaccccctccccgcaattaactgttctcctcagctgggctgg

SEQ ID NO: 4532 - DNA, 134 bp, Mus musculus; identical to SEQ ID NO: 4531
  misc_feature (79)..(93): n is a, c, g, or t

SEQ ID NO: 4533 - DNA, 288 bp, Mus musculus
  misc_feature (48)..(109): n is a, c, g, or t
  misc_feature (263)..(263): n is a, c, g, or t
ggtgagcagactaggctctgcgtgcaggaggtggaaacgctttccccnnnnnnnnnnnnnnnnnnnnnnnnnnnnnnnnnnnnnnnnnnnnnnnnnnnnnnnnnnnnnngtgtccaatcccctactcctccacccccgcctccaccccctaaagtcattctgctgcctcctgccagtgctggaggtccgggcagtggtgctgcaaggccaggccctcggtctgttgggaaagctggacaggggacaggggtggtgtggtttcnaggcccaggtggtctggggctgcaa

SEQ ID NO: 4534 - DNA, 288 bp, Mus musculus; identical to SEQ ID NO: 4533
  misc_feature (48)..(109): n is a, c, g, or t
  misc_feature (263)..(263): n is a, c, g, or t

SEQ ID NO: 4535 - DNA, 416 bp, Mus musculus
  misc_feature (340)..(340): n is a, c, g, or t
agcttctgttcttctcaaaagggcgaatttttaattccccttgcactgtgggaaggagaggtggggttacactaagccttccacatgcatttgtaaataaaattcccattcagatatttcagatggctctcggtagcatctgtttataaaaagtcaggggcctccacttgcattgctaaacaggaagccaaattaattagtggtcagagcgtaagaggcgcttctttcccaaccttaagtccctccacggtttcactcatgaggggctcggatccttcttgtctcaatgacgtgcatttctctgaacagtttctaaacttgttttaaaactataactcanggactttaaaacttactgtagacacaattcctttttataatataagtatttttttctgacagattagcacaaagga

SEQ ID NO: 4536 - DNA, 416 bp, Mus musculus; identical to SEQ ID NO: 4535
  misc_feature (340)..(340): n is a, c, g, or t

SEQ ID NO: 4537 - DNA, 370 bp, Mus musculus
  misc_feature (46)..(46): n is a, c, g, or t
gtaggattcacacctctgaagggctcagctagcttcttcaagagcnctggcctcttgggccggaagtacaaaggaagaaaacccgtttctgagagaaaccttcgcccagccgtccctgctggttttggttttttgtagatctaatggatctttcataaaccttttgaaaagtgtcactattgcatgcatgctgttaaagtgatgtgacgtggaagtgggaacagggcctttaaatgtttgacctcaaaacaatatgcaatagtccctgtgggtgtgtgtgtgtgtgcacatatgtgtatgtggtattccttctgttctcagagatacttagtcctcatattcttgtgacctggggcttaagagcagataa

SEQ ID NO: 4538 - DNA, 370 bp, Mus musculus; identical to SEQ ID NO: 4537
  misc_feature (46)..(46): n is a, c, g, or t

SEQ ID NO: 4539 - DNA, 135 bp, Mus musculus
gcagactccagttactcatgaatatgagaccaggaagaaataagggtctttcaggactctggatctaggcatttgtctgtccttaagtgacaatcacaactggagattgaaagactgatttctgcagtgaacaaa

SEQ ID NO: 4540 - DNA, 135 bp, Mus musculus; identical to SEQ ID NO: 4539

SEQ ID NO: 4541 - DNA, 480 bp, Mus musculus
  misc_feature (175)..(175): n is a, c, g, or t
  misc_feature (179)..(179): n is a, c, g, or t
  misc_feature (195)..(195): n is a, c, g, or t
  misc_feature (208)..(208): n is a, c, g, or t
  misc_feature (240)..(240): n is a, c, g, or t
  misc_feature (300)..(300): n is a, c, g, or t
  misc_feature (316)..(316): n is a, c, g, or t
  misc_feature (319)..(319): n is a, c, g, or t
  misc_feature (393)..(393): n is a, c, g, or t
acacggcccgggacgcccgagaatggcggcctctgcatggtcgtgagcatgaccgccttgtccagtctggacggccatacaaggacagctactggggccgcaagggctgggagctgcaatcccgggggaaggaacggccccacttcaacagcccccgagaggcccctagccttgntgtncccctcgagagacatntccaagagaaggntgcgctgagtgtgcaggacagcagccacagtntccctgagcgctttcatgaacacaaaagtgtcaagtcgaggaagcggaggtatgagactntagaaaataatgatgnccntctagaaaagaaagtccacaaaagcctggagaaggacacgctagaggagccaagggtgaagaagcacaaaaagnctaaaaagaaaaagaagtccaaagataaacaccgggatcgagaaagcaggcaccagcaggagtctgatttttcaggagcatactctg

SEQ ID NO: 4542 - DNA, 480 bp, Mus musculus; identical to SEQ ID NO: 4541
  misc_feature (175)..(175): n is a, c, g, or t
  misc_feature (179)..(179): n is a, c, g, or t
  misc_feature (195)..(195): n is a, c, g, or t
  misc_feature (208)..(208): n is a, c, g, or t
  misc_feature (240)..(240): n is a, c, g, or t
  misc_feature (300)..(300): n is a, c, g, or t
  misc_feature (316)..(316): n is a, c, g, or t
  misc_feature (319)..(319): n is a, c, g, or t
  misc_feature (393)..(393): n is a, c, g, or t

SEQ ID NO: 4543 - DNA, 387 bp, Mus musculus
  misc_feature (153)..(153): n is a, c, g, or t
  misc_feature (191)..(205): n is a, c, g, or t
  misc_feature (253)..(253): n is a, c, g, or t
  misc_feature (257)..(257): n is a, c, g, or t
  misc_feature (261)..(261): n is a, c, g, or t
  misc_feature (264)..(264): n is a, c, g, or t
  misc_feature (272)..(272): n is a, c, g, or t
  misc_feature (274)..(274): n is a, c, g, or t
  misc_feature (295)..(309): n is a, c, g, or t
  misc_feature (328)..(328): n is a, c, g, or t
  misc_feature (345)..(345): n is a, c, g, or t
ccagtctcaggagatgaacaccctcttccgcttttggtccttcttcctccgagatcacttcaataaaaagatgtatgaagagttcaagcagctcgcactggaggatgccaaagaaggctacaggtacggtttggagtgcctttttcgatactncagttatggtctagagaaaaagttccggctggacatannnnnnnnnnnnnnngaggagacagtgaaggactatgaggctggccagctctatggattgganaagnttcnggnccttcttnanatactccaaagccaaaaattnnnnnnnnnnnnnnnaactgcaagaatacctcgncaaattccgccgcttanaagacttccgagtggacgtgagtgaaagtctctcctgactcc

SEQ ID NO: 4544 - DNA, 387 bp, Mus musculus; identical to SEQ ID NO: 4543
  misc_feature (153)..(153): n is a, c, g, or t
  misc_feature (191)..(205): n is a, c, g, or t
  misc_feature (253)..(253): n is a, c, g, or t
  misc_feature (257)..(257): n is a, c, g, or t
  misc_feature (261)..(261): n is a, c, g, or t
  misc_feature (264)..(264): n is a, c, g, or t
  misc_feature (272)..(272): n is a, c, g, or t
  misc_feature (274)..(274): n is a, c, g, or t
  misc_feature (295)..(309): n is a, c, g, or t
  misc_feature (328)..(328): n is a, c, g, or t
  misc_feature (345)..(345): n is a, c, g, or t

SEQ ID NO: 4545 - DNA, 514 bp, Mus musculus
  misc_feature (363)..(363): n is a, c, g, or t
  misc_feature (370)..(370): n is a, c, g, or t
  misc_feature (442)..(442): n is a, c, g, or t
  misc_feature (444)..(445): n is a, c, g, or t
  misc_feature (454)..(454): n is a, c, g, or t
  misc_feature (464)..(464): n is a, c, g, or t
ccaggcactcacaagtgaagagttcagacctccttggcactcatttccatacctgccacctaaccctggctttctgggccttcaagcttttgatgctctaggtctgctgtcttagaaaaacacctttcctccccctagatatgagcagagtatggcagtgtggggaggaccgttcaagagcctttgctaaaagcccttcccaagaactcgcagatgggtgaggccagagctactccagatgcagcagctctaagtagcccacaaggtagcaagagatccctgcctatcaagtgttgaagacatatttatttcatcttactctttctctcccatatcttgtcccttgacttcagatggggtggnacggggnggggggaaaggccaggacagtttccattcccccggagcttgtttcctgaggccaggagctattgtgctgctntnncccagggtntcgctgtaantcctgttgttggtagtaaggggtggacatatggaacactacaacctgagg

SEQ ID NO: 4546 - DNA, 514 bp, Mus musculus; identical to SEQ ID NO: 4545
  misc_feature (363)..(363): n is a, c, g, or t
  misc_feature (370)..(370): n is a, c, g, or t
  misc_feature (442)..(442): n is a, c, g, or t
  misc_feature (444)..(445): n is a, c, g, or t
  misc_feature (454)..(454): n is a, c, g, or t
  misc_feature (464)..(464): n is a, c, g, or t

SEQ ID NO: 4547 - DNA, 440 bp, Mus musculus
  misc_feature (124)..(139): n is a, c, g, or t
atcttaatgtgtctcgctggttttgtcacattcaacattacccagacatcaggcaacatctgtccagtattgtcttcatcaagaacagactctatgctaactcccactagaagccctcgctgtnnnnnnnnnnnnnnnntaatggaaaatgtatcttggaccatggtactaatgtaaattaatatggcatcattgtttctttgttaatgttggtagaatttttaaagtgtaagctcaagtctaaatgttttatttgtcctgtagttgaggcttcgtaatttttttaatgtaaaaatcagctgttatccaaacaaatcaggatcaaattacagatcttgtttttatgaacaaagttgattttggtaacagttgaaaatcagtggctcaactttaaaaaaaaagcccctattgatgtcacatctggctgtttacttttttcg

SEQ ID NO: 4548 - DNA, 440 bp, Mus musculus; identical to SEQ ID NO: 4547
  misc_feature (124)..(139): n is a, c, g, or t

SEQ ID NO: 4549 - DNA, 155 bp, Mus musculus
gtgtgcgcgcgaacactcgtgcttatactgagcagggccctctcagctgtcttgttgatggggcttctcctccattagagacatgatgcctttatgaattaatttctccaacccttcctttccgccatgcgtggccatccggaaccagtattctc

SEQ ID NO: 4550 - DNA, 155 bp, Mus musculus; identical to SEQ ID NO: 4549

SEQ ID NO: 4551 - DNA, 521 bp, Mus musculus
  misc_feature (127)..(172): n is a, c, g, or t
  misc_feature (389)..(403): n is a, c, g, or t
  misc_feature (410)..(424): n is a, c, g, or t
tacttatctgaaaggtagagctttctagcctaagacaccttatgtgaggcttgtttctgcaaaacctgaaagcatctctccctcctggagccagctttcaggaaaagtccctgtgagacacctaagnnnnnnnnnnnnnnnnnnnnnnnnnnnnnnnnnnnnnnnnnnnnnnccccaccccaccccaccaccaccaccctgcccagcgctctccccagggctcctttcttcctgcctctcggaagcttaactgtttgcttcccattatcccctgggaactgggtccttaactagatctaaatgctgggactgctctttctttctccagaattgcttaaaacctctgttggctacttagtattcctgtttggtataaacttataaatggnnnnnnnnnnnnnnnagagctnnnnnnnnnnnnnnngcagatattaacttgtgggggtcagggggaagtgggggtgggggtggagtgcctccctgtaccaggcaggacataactggatctatgtccctgtggt

SEQ ID NO: 4552 - DNA, 521 bp, Mus musculus; identical to SEQ ID NO: 4551
  misc_feature (127)..(172): n is a, c, g, or t
  misc_feature (389)..(403): n is a, c, g, or t
  misc_feature (410)..(424): n is a, c, g, or t

SEQ ID NO: 4553 - DNA, 429 bp, Mus musculus
  misc_feature (142)..(165): n is a, c, g, or t
  misc_feature (221)..(222): n is a, c, g, or t
  misc_feature (224)..(224): n is a, c, g, or t
  misc_feature (227)..(227): n is a, c, g, or t
  misc_feature (350)..(371): n is a, c, g, or t
gtgttttgtcacagatgcccctagtgtttgtgctaacctagtcagaagcaagtgtctcactcacttgctgcagatggaacaaatgccgcctggctttgtattcccctttaggattctattacatatgcaatttgaggtctannnnnnnnnnnnnnnnnnnnnnnnacccccaccactctaagagaaattttagcttatatatgacggtatatttgcaaaannanaangaaaaatctggtatttgcaatgatctgtgccttctttctaccaccctcttgattggagcttttgtgatgcagctaccatgattccaaataagtaaaaatcagccacttctccctgtccactannnnnnnnnnnnnnnnnnnnnnctctcaccctagccaaaggtcctaagaggagacccgctgtgaagtctggcctgctctt

SEQ ID NO: 4554 - DNA, 429 bp, Mus musculus; identical to SEQ ID NO: 4553
  misc_feature (142)..(165): n is a, c, g, or t
  misc_feature (221)..(222): n is a, c, g, or t
  misc_feature (224)..(224): n is a, c, g, or t
  misc_feature (227)..(227): n is a, c, g, or t
  misc_feature (350)..(371): n is a, c, g, or t

SEQ ID NO: 4555 - DNA, 364 bp, Mus musculus
  misc_feature (53)..(53): n is a, c, g, or t
  misc_feature (268)..(339): n is a, c, g, or t
atctcgtgtacctgtgggtcgtgtgggagagacatgagtggaccagcgggtcnaacacagggaaatccaagtctgtgctctgttctcttgaagggaccaagctaaattaccgctggttcaagtagtgaaccgagttgttctcggagatggctgatgcacatgtaacctatttcatctcgtgtgttcctgctgccaccagagcacaggcagtgagtgctgcagaccgccagtgaggagctgctgctgtgggctctggaggtctgagggnnnnnnnnnnnnnnnnnnnnnnnnnnnnnnnnnnnnnnnnnnnnnnnnnnnnnnnnnnnnnnnnnnnnnnnnttaatgacagtcagctctggattac

SEQ ID NO: 4556 - DNA, 364 bp, Mus musculus; identical to SEQ ID NO: 4555
  misc_feature (53)..(53): n is a, c, g, or t
  misc_feature (268)..(339): n is a, c, g, or t

SEQ ID NO: 4557 - DNA, 491 bp, Mus musculus
  misc_feature (27)..(27): n is a, c, g, or t
  misc_feature (38)..(38): n is a, c, g, or t
  misc_feature (44)..(130): n is a, c, g, or t
  misc_feature (224)..(224): n is a, c, g, or t
  misc_feature (227)..(227): n is a, c, g, or t
  misc_feature (237)..(237): n is a, c, g, or t
  misc_feature (247)..(247): n is a, c, g, or t
  misc_feature (294)..(295): n is a, c, g, or t
  misc_feature (304)..(304): n is a, c, g, or t
  misc_feature (306)..(306): n is a, c, g, or t
  misc_feature (308)..(308): n is a, c, g, or t
  misc_feature (312)..(312): n is a, c, g, or t
  misc_feature (316)..(316): n is a, c, g, or t
  misc_feature (318)..(318): n is a, c, g, or t
  misc_feature (320)..(320): n is a, c, g, or t
  misc_feature (383)..(383): n is a, c, g, or t
  misc_feature (385)..(385): n is a, c, g, or t
  misc_feature (388)..(389): n is a, c, g, or t
  misc_feature (391)..(391): n is a, c, g, or t
  misc_feature (393)..(395): n is a, c, g, or t
  misc_feature (398)..(398): n is a, c, g, or t
  misc_feature (400)..(401): n is a, c, g, or t
  misc_feature (403)..(405): n is a, c, g, or t
  misc_feature (408)..(410): n is a, c, g, or t
  misc_feature (413)..(413): n is a, c, g, or t
acagagcactcgacggcaatagaaganaacgcaacagngtcatnnnnnnnnnnnnnnnnnnnnnnnnnnnnnnnnnnnnnnnnnnnnnnnnnnnnnnnnnnnnnnnnnnnnnnnnnnnnnnnnnnnnnnnaaaactgcacatccacagaggagagattgccaagattatcagagagtgtcaagaagagagtttctggaagagagccctgcctttttctcttatnagncatgcttgtnacccagggantcgtccaccaaggttatttagccgctaatccaagatttggatcattnnctaaagttncntnggcnggtntntngggatttggccttgggaaggcttcctatataagagtgtgccagagtaaattccattcctttgnanatnngntnnntgntnntnnnttnnntcntgagcataacaggcactgcctgcttacctgtgaggactgtaaaaccaggcgtggattaagcgagaaggcagggtcaca

SEQ ID NO: 4558 - DNA, 491 bp, Mus musculus; identical to SEQ ID NO: 4557
  misc_feature (27)..(27): n is a, c, g, or t
  misc_feature (38)..(38): n is a, c, g, or t
  misc_feature (44)..(130): n is a, c, g, or t
  misc_feature (224)..(224): n is a, c, g, or t
  misc_feature (227)..(227): n is a, c, g, or t
  misc_feature (237)..(237): n is a, c, g, or t
  misc_feature (247)..(247): n is a, c, g, or t
  misc_feature (294)..(295): n is a, c, g, or t
  misc_feature (304)..(304): n is a, c, g, or t
  misc_feature (306)..(306): n is a, c, g, or t
  misc_feature (308)..(308): n is a, c, g, or t
  misc_feature (312)..(312): n is a, c, g, or t
  misc_feature (316)..(316): n is a, c, g, or t
  misc_feature (318)..(318): n is a, c, g, or t
  misc_feature (320)..(320): n is a, c, g, or t
  misc_feature (383)..(383): n is a, c, g, or t
  misc_feature (385)..(385): n is a, c, g, or t
  misc_feature (388)..(389): n is a, c, g, or t
  misc_feature (391)..(391): n is a, c, g, or t
  misc_feature (393)..(395): n is a, c, g, or t
  misc_feature (398)..(398): n is a, c, g, or t
  misc_feature (400)..(401): n is a, c, g, or t
  misc_feature (403)..(405): n is a, c, g, or t
  misc_feature (408)..(410): n is a, c, g, or t
  misc_feature (413)..(413): n is a, c, g, or t

SEQ ID NO: 4559 - DNA, 594 bp, Mus musculus
  misc_feature (51)..(51): n is a, c, g, or t
  misc_feature (235)..(237): n is a, c, g, or t
  misc_feature (239)..(263): n is a, c, g, or t
  misc_feature (265)..(265): n is a, c, g, or t
  misc_feature (268)..(270): n is a, c, g, or t
  misc_feature (272)..(275): n is a, c, g, or t
  misc_feature (278)..(280): n is a, c, g, or t
  misc_feature (282)..(282): n is a, c, g, or t
  misc_feature (286)..(287): n is a, c, g, or t
  misc_feature (289)..(289): n is a, c, g, or t
  misc_feature (316)..(317): n is a, c, g, or t
  misc_feature (324)..(324): n is a, c, g, or t
  misc_feature (331)..(331): n is a, c, g, or t
  misc_feature (346)..(346): n is a, c, g, or t
  misc_feature (367)..(367): n is a, c, g, or t
  misc_feature (387)..(387): n is a, c, g, or t
  misc_feature (411)..(425): n is a, c, g, or t
  misc_feature (443)..(443): n is a, c, g, or t
  misc_feature (453)..(453): n is a, c, g, or t
  misc_feature (457)..(457): n is a, c, g, or t
  misc_feature (478)..(478): n is a, c, g, or t
  misc_feature (539)..(539): n is a, c, g, or t
gttccccagtcagctccgtttttcatcccaacagttcctgggcttgtcccnaggtttgctgtacccgaacccagcagtgacccccagcagtctaaggtggtaaaccttgggattttggctcaaaagtcaaatttctacctgaaacttgaagaaggattactaaataatcagtatgaagctgctcttaaccttctgaaagaattgggcccatctgggattgaaacagagctgcgannncnnnnnnnnnnnnnnnnnnnnnnnnnanaannnannnngannntnttanncntgattggaatgatgttggacagaaagnntgatttngagttgncccaggcataccttncattgtttttgaagttacacntcagaacgcttccttcgganccagcgcttttagaggagctggtnnnnnnnnnnnnnnnggtagaaaaagattggantcacttacantccntcttcaatcaaagcatgtgtntcttaaattacatcaaaagtgctttcttgtaaagaataaacttaagtgattacagaaatcnaagctatgtgccaagtgtgctgtttaatttgtcttcactctcagctcagagtggg

SEQ ID NO: 4560 - DNA, 594 bp, Mus musculus; identical to SEQ ID NO: 4559
  misc_feature (51)..(51): n is a, c, g, or t
  misc_feature (235)..(237): n is a, c, g, or t
  misc_feature (239)..(263): n is a, c, g, or t
  misc_feature (265)..(265): n is a, c, g, or t
  misc_feature (268)..(270): n is a, c, g, or t
  misc_feature (272)..(275): n is a, c, g, or t
  misc_feature (278)..(280): n is a, c, g, or t
  misc_feature (282)..(282): n is a, c, g, or t
  misc_feature (286)..(287): n is a, c, g, or t
  misc_feature (289)..(289): n is a, c, g, or t
  misc_feature (316)..(317): n is a, c, g, or t
  misc_feature (324)..(324): n is a, c, g, or t
  misc_feature (331)..(331): n is a, c, g, or t
  misc_feature (346)..(346): n is a, c, g, or t
  misc_feature (367)..(367): n is a, c, g, or t
  misc_feature (387)..(387): n is a, c, g, or t
  misc_feature (411)..(425): n is a, c, g, or t
  misc_feature (443)..(443): n is a, c, g, or t
  misc_feature (453)..(453): n is a, c, g, or t
  misc_feature (457)..(457): n is a, c, g, or t
  misc_feature (478)..(478): n is a, c, g, or t
  misc_feature (539)..(539): n is a, c, g, or t

SEQ ID NO: 4561 - DNA, 363 bp, Mus musculus
  misc_feature (221)..(223): n is a, c, g, or t
  misc_feature (226)..(226): n is a, c, g, or t
  misc_feature (248)..(248): n is a, c, g, or t
  misc_feature (275)..(275): n is a, c, g, or t
taattcctgagtgtgtatacgtttctttggctcattgggtccttgttatatttaatgttgtagacagcattactgaactgttttgatggtgtactatttttaaccatttagtgaaataggcttactattaaacattaatttataaggacattacaattcagacaaggaattataattcctaagtatgtgaatttgtaataagatctctttagatcagcgannnccntgtttatctgagaggcgccgcntgccatgagtaccatggacagtgattntactgagtctaatgtttaggccttccagtgtttaaaactgttttattgcaagtttggcagagatgacctcggtgagttcatggtgcag

SEQ ID NO: 4562 - DNA, 363 bp, Mus musculus; identical to SEQ ID NO: 4561
  misc_feature (221)..(223): n is a, c, g, or t
  misc_feature (226)..(226): n is a, c, g, or t
  misc_feature (248)..(248): n is a, c, g, or t
  misc_feature (275)..(275): n is a, c, g, or t

SEQ ID NO: 4563 - DNA, 321 bp, Mus musculus
  misc_feature (26)..(42): n is a, c, g, or t
  misc_feature (47)..(96): n is a, c, g, or t
ccaggcagaccactttgtccactgtnnnnnnnnnnnnnnnnnggtcnnnnnnnnnnnnnnnnnnnnnnnnnnnnnnnnnnnnnnnnnnnnnnnnnntcagcgcagccttaaacctcgaagagggactgctggtcacattagctatgtactcctgcgcctccaggactgggatgcacttgctcttcagcttctccgggttgccacattcaaaattacctgcctggatggccaggaagttgtacagttcgtgcagcagctccaacagggccgccttctgcttggcctggcagaactcatctgtttttctctcacagtcgaccg

SEQ ID NO: 4564 - DNA, 321 bp, Mus musculus; identical to SEQ ID NO: 4563
  misc_feature (26)..(42): n is a, c, g, or t
  misc_feature (47)..(96): n is a, c, g, or t

SEQ ID NO: 4565 - DNA, 603 bp, Mus musculus
  misc_feature (96)..(146): n is a, c, g, or t
  misc_feature (223)..(362): n is a, c, g, or t
  misc_feature (371)..(372): n is a, c, g, or t
  misc_feature (393)..(393): n is a, c, g, or t
  misc_feature (397)..(397): n is a, c, g, or t
  misc_feature (408)..(408): n is a, c, g, or t
  misc_feature (463)..(463): n is a, c, g, or t
  misc_feature (505)..(521): n is a, c, g, or t
cacatgatctgctggccctatgacccaaggactgcttgggctcctggcagatacctggatgaaggtgccacagctctgcttttaaaatcctgcttnnnnnnnnnnnnnnnnnnnnnnnnnnnnnnnnnnnnnnnnnnnnnnnnnnngtaacacacagcgctgcatgcacagagcatagcagtaagcattggggagggggatacagaagacgcagaaactcaannnnnnnnnnnnnnnnnnnnnnnnnnnnnnnnnnnnnnnnnnnnnnnnnnnnnnnnnnnnnnnnnnnnnnnnnnnnnnnnnnnnnnnnnnnnnnnnnnnnnnnnnnnnnnnnnnnnnnnnnnnnnnnnnnnnnnnnnnnnaaaacaaannaaaaaaccaaaacaacaacanaccnatccaaaaccnaccaactagccaacaataacaaaggcatagcaggcttagggtgggggtgccgganaggtgcttccccagtttattacaccagctgctcttaaacagnnnnnnnnnnnnnnnnncaatagctagcactgttagaactttagcttcaagggatctggcatcttctggcctcctcagacacccttacacacatgggac

SEQ ID NO: 4566 - DNA, 603 bp, Mus musculus; identical to SEQ ID NO: 4565
  misc_feature (96)..(146): n is a, c, g, or t
  misc_feature (223)..(362): n is a, c, g, or t
  misc_feature (371)..(372): n is a, c, g, or t
  misc_feature (393)..(393): n is a, c, g, or t
  misc_feature (397)..(397): n is a, c, g, or t
  misc_feature (408)..(408): n is a, c, g, or t
  misc_feature (463)..(463): n is a, c, g, or t
  misc_feature (505)..(521): n is a, c, g, or t

SEQ ID NO: 4567 - DNA, 426 bp, Mus musculus
  misc_feature (175)..(193): n is a, c, g, or t
  misc_feature (228)..(228): n is a, c, g, or t
  misc_feature (238)..(238): n is a, c, g, or t
ggtgactatatacctatatcctatgaacagatttacagttgtgtgtataagtgtgtgtgccagcagcactcagaacagatgtacagtgatctgattaaaaaaataaccagccacttagagcgagtctccaaggagctgcaggccagccctccagacctctatattgaaagatttnnnnnnnnnnnnnnnnnnnatatgggagcattgcagagcatcgtgcctcttttnatatatatgnaataagttttacatagaaactaagcttaacagagacttaaaagatgaccttataaaactgtttacggaacatgttgcagagaagcacatttacagcctaatgcctttacttttagaagcccagtcaacaccatttcaggtcacaccttcaactatggcaaatattgtgaaaggcctgtacactctcag

SEQ ID NO: 4568 - DNA, 426 bp, Mus musculus; identical to SEQ ID NO: 4567
  misc_feature (175)..(193): n is a, c, g, or t
  misc_feature (228)..(228): n is a, c, g, or t
  misc_feature (238)..(238): n is a, c, g, or t

SEQ ID NO: 4569 - DNA, 229 bp, Mus musculus
  misc_feature (33)..(38): n is a, c, g, or t
  misc_feature (40)..(40): n is a, c, g, or t
  misc_feature (42)..(45): n is a, c, g, or t
  misc_feature (50)..(51): n is a, c, g, or t
  misc_feature (54)..(55): n is a, c, g, or t
  misc_feature (64)..(64): n is a, c, g, or t
  misc_feature (108)..(108): n is a, c, g, or t
  misc_feature (175)..(175): n is a, c, g, or t
gagccgctgaatgagaaggttgtcagctagacnnnnnncngnnnnctttnnccnnttgtcctcncagggcttcagtctgaacaagggccctgctgcagagccggccgncgagtcagccaggcggaggggatggcctccattgcagctgagggcttcacaactgcagcaactgccnggggctgggaaggagacttcctcagccttgccctcatgaacagcggctggaaca

SEQ ID NO: 4570 - DNA, 229 bp, Mus musculus; identical to SEQ ID NO: 4569
  misc_feature (33)..(38): n is a, c, g, or t
  misc_feature (40)..(40): n is a, c, g, or t
  misc_feature (42)..(45): n is a, c, g, or t
  misc_feature (50)..(51): n is a, c, g, or t
  misc_feature (54)..(55): n is a, c, g, or t
  misc_feature (64)..(64): n is a, c, g, or t
  misc_feature (108)..(108): n is a, c, g, or t
  misc_feature (175)..(175): n is a, c, g, or t

SEQ ID NO: 4571 - DNA, 187 bp, Mus musculus
  misc_feature (149)..(149): n is a, c, g, or t
ccctcacggtaatggcttttggaagaggactcttgtacctgctgacggccgctgtctgtgcgtccatccttcccttcaggctggccatggaggcgacaatcacacagactcgtctgtccctgtgcctgggaagcccggcctctggacgnacaccacctccctctgctgccctgctggcttttgtaga

SEQ ID NO: 4572 - DNA, 187 bp, Mus musculus; identical to SEQ ID NO: 4571
  misc_feature (149)..(149): n is a, c, g, or t

SEQ ID NO: 4573 - DNA, 609 bp, Mus musculus
  misc_feature (138)..(138): n is a, c, g, or t
  misc_feature (144)..(144): n is a, c, g, or t
  misc_feature (205)..(237): n is a, c, g, or t
  misc_feature (317)..(332): n is a, c, g, or t
  misc_feature (358)..(358): n is a, c, g, or t
  misc_feature (544)..(545): n is a, c, g, or t
ctcaagcacaaggacaagcaggaaaacggcgaaaggagcggaggggtgcctctgatcaaggcccccaagagagaaacagcagatgaaaatggtaaaacccagagagctgatgattttgtcttgaagaaaataaagaanaaaaanaaaaagaaacatcgagaagacatgagaggaagacgccttaaaatgtacaataaggaagtannnnnnnnnnnnnnnnnnnnnnnnnnnnnnnnnaaagaaattctcacccaaggacagctaaatagcacttcaggagttaataaggagtccttcaggtatttgaaggatgaacnnnnnnnnnnnnnnnntttgggcatgcaagaatatcgggtgncccagggagtacagacaccttttacaacgcaccaagaacattctattcgcagaaatttcttaaaaacaggtactaaatttagcaactttattcacgaagaacaccagtccaatgggggtgctcttgtccttcatgcatacatggacgaactctcatttttgtctccaatggagatggagagatttnntgaggagtttcttgctttgacattcagtgaaaatgagaaaaacgctgcgtactatgcgttagca

SEQ ID NO: 4574 - DNA, 609 bp, Mus musculus; identical to SEQ ID NO: 4573
  misc_feature (138)..(138): n is a, c, g, or t
  misc_feature (144)..(144): n is a, c, g, or t
  misc_feature (205)..(237): n is a, c, g, or t
  misc_feature (317)..(332): n is a, c, g, or t
  misc_feature (358)..(358): n is a, c, g, or t
  misc_feature (544)..(545): n is a, c, g, or t

SEQ ID NO: 4575 - DNA, 615 bp, Mus musculus
  misc_feature (39)..(40): n is a, c, g, or t
  misc_feature (43)..(46): n is a, c, g, or t
  misc_feature (52)..(54): n is a, c, g, or t
  misc_feature (61)..(61): n is a, c, g, or t
  misc_feature (69)..(69): n is a, c, g, or t
  misc_feature (74)..(74): n is a, c, g, or t
  misc_feature (94)..(94): n is a, c, g, or t
  misc_feature (99)..(100): n is a, c, g, or t
  misc_feature (110)..(110): n is a, c, g, or t
  misc_feature (166)..(166): n is a, c, g, or t
  misc_feature (168)..(168): n is a, c, g, or t
  misc_feature (170)..(170): n is a, c, g, or t
  misc_feature (184)..(184): n is a, c, g, or t
  misc_feature (261)..(261): n is a, c, g, or t
  misc_feature (322)..(322): n is a, c, g, or t
  misc_feature (327)..(327): n is a, c, g, or t
  misc_feature (333)..(333): n is a, c, g, or t
  misc_feature (338)..(340): n is a, c, g, or t
  misc_feature (396)..(411): n is a, c, g, or t
  misc_feature (466)..(508): n is a, c, g, or t
tggcaacataactcaggaaactaagaaaatggacatgannggnnnncagaannncaaagtngaaaaaantgggnattagttgaagatctaaacnaaggnnagctaagccntgtagttgttctgcaaaaactatcgctggatgatgtccagaagctaattaaagatngngnggagaaatcaagangttcccttaagtctatcaagaataagccatcaaagtcaaataaaggtagtatagatcaatcagtgttaaaagaattnccccctgagctcctggcagaaattgaatctaccatgccactttgtgaacgtgtgaaaatgnacaancgcaancgtannncagttaatgaaaagccaaaatatgctgaaatcagttcagatgaagataatgatagnnnnnnnnnnnnnnnntcctctaggaaacggcataaaaaagatgacgataaagcttgggaatacgaagagnnnnnnnnnnnnnnnnnnnnnnnnnnnnnnnnnnnnnnnnnnncccatgacggaaggaggagctcgggtggtggtcgttaccgaaaccgaagtccgtccgattctgacatggaagattactcccctcctcccagccttagtgaggttgct

SEQ ID NO: 4576 - DNA, 615 bp, Mus musculus; identical to SEQ ID NO: 4575
  misc_feature (39)..(40): n is a, c, g, or t
  misc_feature (43)..(46): n is a, c, g, or t
  misc_feature (52)..(54): n is a, c, g, or t
  misc_feature (61)..(61): n is a, c, g, or t
  misc_feature (69)..(69): n is a, c, g, or t
  misc_feature (74)..(74): n is a, c, g, or t
  misc_feature (94)..(94): n is a, c, g, or t
  misc_feature (99)..(100): n is a, c, g, or t
  misc_feature (110)..(110): n is a, c, g, or t
  misc_feature (166)..(166): n is a, c, g, or t
  misc_feature (168)..(168): n is a, c, g, or t
  misc_feature (170)..(170): n is a, c, g, or t
  misc_feature (184)..(184): n is a, c, g, or t
  misc_feature (261)..(261): n is a, c, g, or t
  misc_feature (322)..(322): n is a, c, g, or t
  misc_feature (327)..(327): n is a, c, g, or t
  misc_feature (333)..(333): n is a, c, g, or t
  misc_feature (338)..(340): n is a, c, g, or t
  misc_feature (396)..(411): n is a, c, g, or t
  misc_feature (466)..(508): n is a, c, g, or t

SEQ ID NO: 4577 - DNA, 437 bp, Mus musculus
cccactcaggtgttcgttgttacagtgctaatggatcctgggtgcagtaggcgctgggtcctcctgacctctgtttcactgtttgtggtaaggtagccacacctggagctcacgtgtaacctggagcgctgtgctaccagtagctttggggttttggaagcagacacaccaaagccgagcatcatagagaatgaatccctctggaaacacttactctcagaaaatgacactcttcccacatgtggggttttctcagtgttctaagtttttaagaagttttatcttgtgtatttgcatcaaacatttctttatgtgctaaatgtttgctctttaaaaatgtctcagagttagttaccagcttccttgatttcatctatacacaatgattaagtgcatttaatattggtaatttaatgaaaagcattccttgcccaatg

SEQ ID NO: 4578 - DNA, 437 bp, Mus musculus; identical to SEQ ID NO: 4577

SEQ ID NO: 4579 - DNA, 545 bp, Mus musculus
  misc_feature (40)..(56): n is a, c, g, or t
  misc_feature (93)..(94): n is a, c, g, or t
  misc_feature (96)..(106): n is a, c, g, or t
  misc_feature (171)..(172): n is a, c, g, or t
  misc_feature (183)..(183): n is a, c, g, or t
  misc_feature (190)..(190): n is a, c, g, or t
  misc_feature (256)..(273): n is a, c, g, or t
  misc_feature (396)..(428): n is a, c, g, or t
tctccctgtcaccttctgacaaaggccacaggggaatagnnnnnnnnnnnnnnnnnggcagcctgccaggaccgcctgaccccagaaggcacnntnnnnnnnnnnnaaaacccaagtcttggtccggtgtcacttagctgctagtgtgagaataggaaagttgattttganntcccctcctanccccaancccccacccccgtgcttcccctgtgcacctacagacacacccttctccagtgcagccctgcctctnnnnnnnnnnnnnnnnnncccacctgcctccctggcctgatggtccgcagatgtcccatgccttgtccccggaagtcgaagcttaccctgccttctactcagggatccacctccagcgtggtaccgggaggctggtgcctnnnnnnnnnnnnnnnnnnnnnnnnnnnnnnnnncatttctcgctcagattccattttaattttattttgcaaaaggctgtgccatcttaaggatgtgtggcacacatcgcaccaaggtttatataggaatgtcttcctggaggctgcttt

SEQ ID NO: 4580 - DNA, 545 bp, Mus musculus; identical to SEQ ID NO: 4579
  misc_feature (40)..(56): n is a, c, g, or t
  misc_feature (93)..(94): n is a, c, g, or t
  misc_feature (96)..(106): n is a, c, g, or t
  misc_feature (171)..(172): n is a, c, g, or t
  misc_feature (183)..(183): n is a, c, g, or t
  misc_feature (190)..(190): n is a, c, g, or t
  misc_feature (256)..(273): n is a, c, g, or t
  misc_feature (396)..(428): n is a, c, g, or t

SEQ ID NO: 4581 - DNA, 324 bp, Mus musculus
  misc_feature (46)..(46): n is a, c, g, or t
  misc_feature (266)..(266): n is a, c, g, or t
  misc_feature (278)..(292): n is a, c, g, or t
gctgacttcactcagatatgctaaccccatgtacttgttgaagatngcggagtttaccaggagttggtggaatttattctttacatccaaataaattgtaatggaaataataagtaaaactgcaggacagttttaggatttggtggcactaccgaagatccttccttcaaagcaagatattgtgttttgagggaagaaaagcttaatttttagtaaacttgtttctaatatgtaatcatatttatatttttatgctgtaaagagtngtatggaactgnnnnnnnnnnnnnnnttgagaatgtgtcatgtgctttggcatacctt

SEQ ID NO: 4582 - DNA, 324 bp, Mus musculus; identical to SEQ ID NO: 4581
  misc_feature (46)..(46): n is a, c, g, or t
  misc_feature (266)..(266): n is a, c, g, or t
  misc_feature (278)..(292): n is a, c, g, or t

SEQ ID NO: 4583 - DNA, 522 bp, Mus musculus
  misc_feature (108)..(108): n is a, c, g, or t
  misc_feature (117)..(117): n is a, c, g, or t
  misc_feature (122)..(122): n is a, c, g, or t
  misc_feature (133)..(133): n is a, c, g, or t
  misc_feature (149)..(149): n is a, c, g, or t
  misc_feature (174)..(174): n is a, c, g, or t
  misc_feature (178)..(178): n is a, c, g, or t
  misc_feature (186)..(186): n is a, c, g, or t
  misc_feature (259)..(259): n is a, c, g, or t
ccagtgagtgccttgttagtgtagagtgatctttcccgttgtccgttagtctttctgagagggtctcagagactgagctttgagttggctgggcgagctgctgagatnggtgatacngcatngggaagtcttnggtctgccatgtccantctccctgctttctcttcatccttnggcnggtgttgnccccttgtgagaaaacaaatagagcccccttcacgctatttttatttccgcttaaggcgtgtcccccattccngccccagctatatgatccaatgcctgttttaggaagaaccacttctttgtaatatgaaaatctaccacttattttatgtcttctcaatatcagtttactggagcggatctcagggtatcatcagttcagattcctaaataacactttctcttcaacccaaaccccaactggtgagccctgggccagattgtttgatatcaggtatcttaaacttcagttataatatcaattaatgtaaatccaaatgcaaatttgtgtggtgc

SEQ ID NO: 4584 - DNA, 522 bp, Mus musculus; identical to SEQ ID NO: 4583
  misc_feature (108)..(108): n is a, c, g, or t
  misc_feature (117)..(117): n is a, c, g, or t
  misc_feature (122)..(122): n is a, c, g, or t
  misc_feature (133)..(133): n is a, c, g, or t
  misc_feature (149)..(149): n is a, c, g, or t
  misc_feature (174)..(174): n is a, c, g, or t
  misc_feature (178)..(178): n is a, c, g, or t
  misc_feature (186)..(186): n is a, c, g, or t
  misc_feature (259)..(259): n is a, c, g, or t

SEQ ID NO: 4585 - DNA, 530 bp, Mus musculus
  misc_feature (43)..(43): n is a, c, g, or t
  misc_feature (47)..(47): n is a, c, g, or t
  misc_feature (55)..(55): n is a, c, g, or t
  misc_feature (58)..(58): n is a, c, g, or t
  misc_feature (61)..(62): n is a, c, g, or t
  misc_feature (155)..(155): n is a, c, g, or t
  misc_feature (289)..(289): n is a, c, g, or t
  misc_feature (300)..(301): n is a, c, g, or t
  misc_feature (464)..(464): n is a, c, g, or t
  misc_feature (474)..(474): n is a, c, g, or t
ggagcctcatgattacagccaccaccaccaccaccaccatcanccgntggccgtnganccnngacgggagcacgaacgaggaggacacctggatgaacgcgagcggctgcacgtgcttcgggaggactatgagcacccgcggttgcaccctgtgnaccccgcttctctagatggacacctcccacacccgagcctgctcacaccaggcctgcctagtatgcactaccctcgcatcagccctactgcgggccaccagaatggactgcttaacaagaccccgcccactgcngcgcttagcgnnccacctccgctcatctccacattggggggccgcccgggatccccccggaggactacgcctctgtcggctgaaatccgagagaggccaccgtcccacacactgaaggacattgaagctcggtaagccaggaggacaaggcagacctcggagtgggggaggaatncccagggaancccccccccagactcaagagacaactcccgcacccctaaacttgagaggtgcagag

SEQ ID NO: 4586 - DNA, 530 bp, Mus musculus; identical to SEQ ID NO: 4585
  misc_feature (43)..(43): n is a, c, g, or t
  misc_feature (47)..(47): n is a, c, g, or t
  misc_feature (55)..(55): n is a, c, g, or t
  misc_feature (58)..(58): n is a, c, g, or t
  misc_feature (61)..(62): n is a, c, g, or t
  misc_feature (155)..(155): n is a, c, g, or t
  misc_feature (289)..(289): n is a, c, g, or t
  misc_feature (300)..(301): n is a, c, g, or t
  misc_feature (464)..(464): n is a, c, g, or t
  misc_feature (474)..(474): n is a, c, g, or t

SEQ ID NO: 4587 - DNA, 351 bp, Mus musculus
  misc_feature (41)..(41): n is a, c, g, or t
  misc_feature (85)..(123): n is a, c, g, or t
  misc_feature (131)..(133): n is a, c, g, or t
  misc_feature (157)..(157): n is a, c, g, or t
  misc_feature (163)..(163): n is a, c, g, or t
  misc_feature (181)..(182): n is a, c, g, or t
  misc_feature (195)..(195): n is a, c, g, or t
  misc_feature (211)..(211): n is a, c, g, or t
tgtcaaacaattaagaccagccctgtttagtcatttacagnccaattgggaaaagtgtttactcaactttaccatggacaacaannnnnnnnnnnnnnnnnnnnnnnnnnnnnnnnnnnnnnnctagggtnnnagggctcacagtgattataataangaaggnttaataattagtgcaacnnccaacctctaacnagagtaggttgatagncaagtaaattaagagtttgttatcaattccataaatgtgactataaaatctggtactgactttctggtcctgatgctagaatgaaggtggagaccttgctgcctggagggaatgtgcttggcccacaagcttgtgcaata

SEQ ID NO: 4588 - DNA, 351 bp, Mus musculus; identical to SEQ ID NO: 4587
  misc_feature (41)..(41): n is a, c, g, or t
  misc_feature (85)..(123): n is a, c, g, or t
  misc_feature (131)..(133): n is a, c, g, or t
  misc_feature (157)..(157): n is a, c, g, or t
  misc_feature (163)..(163): n is a, c, g, or t
  misc_feature (181)..(182): n is a, c, g, or t
  misc_feature (195)..(195): n is a, c, g, or t
  misc_feature (211)..(211): n is a, c, g, or t

SEQ ID NO: 4589 - DNA, 403 bp, Mus musculus
  misc_feature (83)..(140): n is a, c, g, or t
ctcgacaaatatctagatatatggtggacatggccccaagtcatggggagagtagagcagcctgggcccccccacccccaagnnnnnnnnnnnnnnnnnnnnnnnnnnnnnnnnnnnnnnnnnnnnnnnnnnnnnnnnnncacatagtttttaagctaccctggatttactgagggtgtacctggacatgggagaggtttttaactggaaagtgtgtcccctatctgcatgctggtctctctctctctctgcccaactcttgcacccaaaaatgaggtgagggcaggtctccacccacctcttgcctgctcacagacccactcgtgagtcgggaaagcctcagctttggggtgtggggctttgtagaagtggaaggagatttgaagtggctatctcctacaac

SEQ ID NO: 4590 - DNA, 403 bp, Mus musculus; identical to SEQ ID NO: 4589
  misc_feature (83)..(140): n is a, c, g, or t

SEQ ID NO: 4591 - DNA, 350 bp, Mus musculus
ccatgggcatgatgcagttcaacgacatcctacagaacctcaaacgcagcaaacagaccaaggagttgtggcagcgggtctctctggagataaccaccttctccccctgagtctggtccctggagggccctatttagggacacaggcctgtggctatggggagccctcacacagagggtcaggcgactcttggctggacagatcatccccactcaattcccttgtagcccagactggcagctgctcttgggctgtagcttggggccaagatgtctcagaccttagaagtctagggttgggggagacagctttgtctgggagagggcgttgggtggcctctggtatttatt

SEQ ID NO: 4592 - DNA, 350 bp, Mus musculus; identical to SEQ ID NO: 4591

SEQ ID NO: 4593 - DNA, 422 bp, Mus musculus
  misc_feature (338)..(338): n is a, c, g, or t
  misc_feature (341)..(341): n is a, c, g, or t
  misc_feature (346)..(346): n is a, c, g, or t
gctttctctagatagccttatttgattttgagtggcaaaatgtttttccttttgtactctggcttttctattgctgtatgatacagaactcttttggcataaatatttgtgttcccagtacctcagtcgtttgggttttcctgcctgcatctgttttgtgaaatggtcctgtttttgggtaggtgacacgtggactctagtgtgtaaatgttacttgaatctgtgcttcactctagtatgtggcatgtgtgtgcggactcttggatgcttcacgcctactccactggagcccctgtccccaggaggacagcttccccactgataatcaggagaccaanctnccatngatttacccttgattctattttgataatggaagatacagagagagggtttttacattcagaagatggtgctgtggc

SEQ ID NO: 4594 - DNA, 422 bp, Mus musculus; identical to SEQ ID NO: 4593
  misc_feature (338)..(338): n is a, c, g, or t
  misc_feature (341)..(341): n is a, c, g, or t
  misc_feature (346)..(346): n is a, c, g, or t

SEQ ID NO: 4595 - DNA, 455 bp, Mus musculus
  misc_feature (175)..(189): n is a, c, g, or t
  misc_feature (305)..(305): n is a, c, g, or t
  misc_feature (307)..(307): n is a, c, g, or t
  misc_feature (322)..(322): n is a, c, g, or t
  misc_feature (381)..(381): n is a, c, g, or t
  misc_feature (383)..(383): n is a, c, g, or t
  misc_feature (412)..(412): n is a, c, g, or t
  misc_feature (415)..(415): n is a, c, g, or t
  misc_feature (418)..(419): n is a, c, g, or t
ccctgtctgttttcgttatggcgccttgtacttctacccaacgttgcccgccccccatcttcccagcccaccagctccgtccgcctctccggatgattcgtgagataccgagcctgccgggaagggaccggatttttccgtctggtccaaggaagcacgggttatggccacatgnnnnnnnnnnnnnnngggccccacgccttttgacccctgttgatgaagattgtgaggagggagaccagaagataatggacaacgatacagcagaagggtctggttacacttgagcttatttcttggaagantntgagaagacggcctntcaggctcctaacactaagggccatgtaaccagtgaagcagccattatatatgatttgntntacacttgttggaaaaattccacaagagnatntcnnggaagctagcagaagtttttggcttgtacattgcca

SEQ ID NO: 4596 - DNA, 455 bp, Mus musculus; identical to SEQ ID NO: 4595
  misc_feature (175)..(189): n is a, c, g, or t
  misc_feature (305)..(305): n is a, c, g, or t
  misc_feature (307)..(307): n is a, c, g, or t
  misc_feature (322)..(322): n is a, c, g, or t
  misc_feature (381)..(381): n is a, c, g, or t
  misc_feature (383)..(383): n is a, c, g, or t
  misc_feature (412)..(412): n is a, c, g, or t
  misc_feature (415)..(415): n is a, c, g, or t
  misc_feature (418)..(419): n is a, c, g, or t

SEQ ID NO: 4597 - DNA, 441 bp, Mus musculus
  misc_feature (217)..(248): n is a, c, g, or t
  misc_feature (270)..(271): n is a, c, g, or t
  misc_feature (276)..(276): n is a, c, g, or t
  misc_feature (278)..(278): n is a, c, g, or t
  misc_feature (281)..(282): n is a, c, g, or t
  misc_feature (287)..(289): n is a, c, g, or t
  misc_feature (294)..(294): n is a, c, g, or t
  misc_feature (298)..(299): n is a, c, g, or t
  misc_feature (301)..(302): n is a, c, g, or t
  misc_feature (306)..(306): n is a, c, g, or t
  misc_feature (327)..(327): n is a, c, g, or t
  misc_feature (357)..(357): n is a, c, g, or t
  misc_feature (360)..(360): n is a, c, g, or t
  misc_feature (363)..(363): n is a, c, g, or t
  misc_feature (365)..(365): n is a, c, g, or t
  misc_feature (370)..(370): n is a, c, g, or t
  misc_feature (380)..(380): n is a, c, g, or t
  misc_feature (382)..(382): n is a, c, g, or t
  misc_feature (385)..(385): n is a, c, g, or t
  misc_feature (389)..(389): n is a, c, g, or t
  misc_feature (394)..(394): n is a, c, g, or t
  misc_feature (406)..(406): n is a, c, g, or t
gcctcagtggccacggttgtgctgagtgggaacgaactctggctgggcctgtcttttgaaatctttttttaaaagtatttattttatgtgtataagtgttttacttgcatgtctgtatgtatgtgcagaacccttagaggttaaaagaggtgattagacccctctgggactggagttagggatgcttgtgaacccccatgcgggtgctgagaactgnnnnnnnnnnnnnnnnnnnnnnnnnnnnnnnnctgttcactaaagttcctcttnnccccngnccnnccttnnnatggnaaanntnnttcntcccatggaagagaagaatantaaggcccagagagggcagggaatactganatnatntnacaantgagagccantnttntggntattntaagtcactttntggtagtgtggctgagcgacttagggaaagataca

SEQ ID NO: 4598 - DNA, 441 bp, Mus musculus; identical to SEQ ID NO: 4597
  misc_feature (217)..(248): n is a, c, g, or t
  misc_feature (270)..(271): n is a, c, g, or t
  misc_feature (276)..(276): n is a, c, g, or t
  misc_feature (278)..(278): n is a, c, g, or t
  misc_feature (281)..(282): n is a, c, g, or t
  misc_feature (287)..(289): n is a, c, g, or t
  misc_feature (294)..(294): n is a, c, g, or t
  misc_feature (298)..(299): n is a, c, g, or t
  misc_feature (301)..(302): n is a, c, g, or t
  misc_feature (306)..(306): n is a, c, g, or t
  misc_feature (327)..(327): n is a, c, g, or t
  misc_feature (357)..(357): n is a, c, g, or t
  misc_feature (360)..(360): n is a, c, g, or t
  misc_feature (363)..(363): n is a, c, g, or t
  misc_feature (365)..(365): n is a, c, g, or t
  misc_feature (370)..(370): n is a, c, g, or t
  misc_feature (380)..(380): n is a, c, g, or t
  misc_feature (382)..(382): n is a, c, g, or t
  misc_feature (385)..(385): n is a, c, g, or t
  misc_feature (389)..(389): n is a, c, g, or t
  misc_feature (394)..(394): n is a, c, g, or t
  misc_feature (406)..(406): n is a, c, g, or t

SEQ ID NO: 4599 - DNA, 555 bp, Mus musculus
  misc_feature (96)..(96): n is a, c, g, or t
  misc_feature (235)..(288): n is a, c, g, or t
gagcaattcttttgcttacaagtttttttaaagcatttgtgctttaaaattgtgctagtgtttggaatatgataccctataacccagataagaaanataagaatggagtaaacgctgtcgcttgtcgtgctatgcccagcttggcgtgctggatcagcagtgggactccggagtccctagggtcacaccagctcacctgcagcttgttgcctttctgtgccgtccgcccgccctnnnnnnnnnnnnnnnnnnnnnnnnnnnnnnnnnnnnnnnnnnnnnnnnnnnnnntgcctttttggtgttgtatcccaaactgcatagattatttaggataatgataagtttaaaaaattaatgttgaagaaagattttattaagaatttaaatgttttttcattatattgttaaacttgaacatttatctgtggcttatgtgatttggttaatatgtataaaaattgtaagaggtttatatttcatcttaattcttttgatgttgtaaacgtgcttttcaattcattatttgaatgtttatggcacctgacttgtaaaaag

SEQ ID NO: 4600 - DNA, 555 bp, Mus musculus; identical to SEQ ID NO: 4599
  misc_feature (96)..(96): n is a, c, g, or t
  misc_feature (235)..(288): n is a, c, g, or t

SEQ ID NO: 4601 - DNA, 544 bp, Mus musculus
  misc_feature (363)..(363): n is a, c, g, or t
  misc_feature (435)..(435): n is a, c, g, or t
  misc_feature (446)..(446): n is a, c, g, or t
gcctgttatagttctcttccccgttcccacctcagtccctaaaaaacatcctgataaaccccagccttcaaacacatgaattcagaatgaaaggtttgccatggctaaggaatatgaatgactttgaaaacgatgctagcatctgaggaactttttaaaaactttgcttttagggattttcctttccttcggtaagtagtgatttatgaactccttgtttgactgttgcatggttacttaagtgtggaatcaaatcaagtggcatttaattcaggtggctgttccttgccatggcaaagtatcaagaagatccccaagtcaagtcacatttgtaaagctgcttcccaattggctttgtcacgnagtgttgaagcagtgggagagagattcacctgttataaaggaactgactaacacgagtatcccgtctatatntgaatgctgtntctaggtgtaagccgtggtttcgccttcgtggagttttatcacttgcaagatgctaccagctggatggaagccaatcaggttgcttcactcaccaagt

SEQ ID NO: 4602 - DNA, 544 bp, Mus musculus; identical to SEQ ID NO: 4601
  misc_feature (363)..(363): n is a, c, g, or t
  misc_feature (435)..(435): n is a, c, g, or t
  misc_feature (446)..(446): n is a, c, g, or t

SEQ ID NO: 4603 - DNA, 493 bp, Mus musculus
  misc_feature (30)..(30): n is a, c, g, or t
  misc_feature (160)..(160): n is a, c, g, or t
ctgtctgtctgtaccggagcttgctgatcntcggctcctgccttagccacatactgttgcactcagctcttaatatagtttctgggggaacttggacccggttcttatatctgccacttgattgaactgaggtatcaccccagccccacaacgatctttnagaaccagaatatcaaaacgttcatcagatctcttaagtcccactgctcaggaacaagatccaggctgatcagcataccaggccagtcccagtcaggaagcatatagccttattcggggtttagaagaaccttttagactgggaacacagaaggcctgcttggcccctggggtggggtcacttgagttatctgtgacttatccctctttagtttgtcagttcctgcagtcagttttaggaccctcatctagttaacaggagcaaagaaaggcaggactgacttgtatcctgcaccaggagtcattaatcagagcatctttcattttgtcacag

SEQ ID NO: 4604 - DNA, 493 bp, Mus musculus; identical to SEQ ID NO: 4603
  misc_feature (30)..(30): n is a, c, g, or t
  misc_feature (160)..(160): n is a, c, g, or t

SEQ ID NO: 4605 - DNA, 493 bp, Mus musculus; identical to SEQ ID NO: 4603
  misc_feature (30)..(30): n is a, c, g, or t
  misc_feature (160)..(160): n is a, c, g, or t

SEQ ID NO: 4606 - DNA, 352 bp, Mus musculus
  misc_feature (59)..(59): n is a, c, g, or t
  misc_feature (77)..(77): n is a, c, g, or t
  misc_feature (90)..(90): n is a, c, g, or t
  misc_feature (153)..(153): n is a, c, g, or t
  misc_feature (178)..(178): n is a, c, g, or t
  misc_feature (180)..(180): n is a, c, g, or t
  misc_feature (244)..(244): n is a, c, g, or t
  misc_feature (247)..(247): n is a, c, g, or t
  misc_feature (253)..(253): n is a, c, g, or t
  misc_feature (258)..(258): n is a, c, g, or t
  misc_feature (292)..(292): n is a, c, g, or t
  misc_feature (300)..(300): n is a, c, g, or t
caatttggggcttctcgggctacacccccagaggcttatcagaacatctttttaacccntaggtagttccctcctcngtcctttttattnacgggatatccctgcacattcagagaatggcttcctttctcttggtcttgtcctgttaaaggnactgccttacctgtaactcacgggnancctctgtctgaagacttgataagtgtgagaggtcaagccctggacttgggagccctggagggtnagnaaggtnggttnacaaaggaagtaaaagccacctgtcctcagggtnttacagtntgtaagtttatagtttgcctgatttggaaggctaagcaaacacagatacacc

SEQ ID NO: 4607 - DNA, 352 bp, Mus musculus; identical to SEQ ID NO: 4606
  misc_feature (59)..(59): n is a, c, g, or t
  misc_feature (77)..(77): n is a, c, g, or t
  misc_feature (90)..(90): n is a, c, g, or t
  misc_feature (153)..(153): n is a, c, g, or t
  misc_feature (178)..(178): n is a, c, g, or t
  misc_feature (180)..(180): n is a, c, g, or t
  misc_feature (244)..(244): n is a, c, g, or t
  misc_feature (247)..(247): n is a, c, g, or t
  misc_feature (253)..(253): n is a, c, g, or t
  misc_feature (258)..(258): n is a, c, g, or t
  misc_feature (292)..(292): n is a, c, g, or t
  misc_feature (300)..(300): n is a, c, g, or t

SEQ ID NO: 4608 - DNA, 399 bp, Mus musculus
  misc_feature (197)..(197): n is a, c, g, or t
  misc_feature (200)..(200): n is a, c, g, or t
  misc_feature (213)..(213): n is a, c, g, or t
  misc_feature (251)..(251): n is a, c, g, or t
gaaagaacccctagacaactgattttttcagcatctcccacagggagggaagtcctccttgaacaaacaaggcaccagtagctttgggtcgagccctacttcagattccggcccaaggcaacagaatcccacgagcacatcaagggcagaatctggctatagaacagaagacggatggagggaagtcatgatctgcngtnaagcaaataaatnacctttaaaatcacatctgcagacggtctaatgtccgntaaatgctctccaataagctgtactggtagcttgccacaaagccctgtctggaaggcttcataacagatggaagcaagattcatgacctggcttcgacactgcggctgaccaattttgtgaccttaggctcttcatttcaccttgctg

SEQ ID NO: 4609 - DNA, 399 bp, Mus musculus; identical to SEQ ID NO: 4608
  misc_feature (197)..(197): n is a, c, g, or t
  misc_feature (200)..(200): n is a, c, g, or t
  misc_feature (213)..(213): n is a, c, g, or t
  misc_feature (251)..(251): n is a, c, g, or t

SEQ ID NO: 4610 - DNA, 399 bp, Mus musculus; identical to SEQ ID NO: 4608
  misc_feature (197)..(197): n is a, c, g, or t
  misc_feature (200)..(200): n is a, c, g, or t
  misc_feature (213)..(213): n is a, c, g, or t
  misc_feature (251)..(251): n is a, c, g, or t

SEQ ID NO: 4611 - DNA, 494 bp, Mus musculus
  misc_feature (43)..(43): n is a, c, g, or t
  misc_feature (45)..(103): n is a, c, g, or t
  misc_feature (106)..(106): n is a, c, g, or t
  misc_feature (117)..(117): n is a, c, g, or t
  misc_feature (137)..(137): n is a, c, g, or t
  misc_feature (185)..(185): n is a, c, g, or t
atcggatcccccagaggttgtgagcccaccatgtggatgctgngnnnnnnnnnnnnnnnnnnnnnnnnnnnnnnnnnnnnnnnnnnnnnnnnnnnnnnnnnnncancccgtcataanggtttttaaaaaactaattnggcctttaataaaatcctcattttaaattctatagagaatttattagnaaactagggactggcttaaaagttcagtgccatgttgtagatagaaattatattaattatacccagattattgacagctatattgaaaatagatatattaaatgaaaataaaatcactaagactagcaatgatgggactatacagaaaaaggtaccagtgctggggctggagagagagctcagtaattaagaacagtggctgctcttgcaaaggacttgggttcaatttctagcacccacatggtgtaattccagtttcaagggttccagtgcattcttctgacatttattggcaccaagcatgggcat

SEQ ID NO: 4612 - DNA, 494 bp, Mus musculus; identical to SEQ ID NO: 4611
  misc_feature (43)..(43): n is a, c, g, or t
  misc_feature (45)..(103): n is a, c, g, or t
  misc_feature (106)..(106): n is a, c, g, or t
  misc_feature (117)..(117): n is a, c, g, or t
  misc_feature (137)..(137): n is a, c, g, or t
  misc_feature (185)..(185): n is a, c, g, or t

SEQ ID NO: 4613 - DNA, 494 bp, Mus musculus; identical to SEQ ID NO: 4611
  misc_feature (43)..(43): n is a, c, g, or t
  misc_feature (45)..(103): n is a, c, g, or t
  misc_feature (106)..(106): n is a, c, g, or t
  misc_feature (117)..(117): n is a, c, g, or t
  misc_feature (137)..(137): n is a, c, g, or t
  misc_feature (185)..(185): n is a, c, g, or t

SEQ ID NO: 4614 - DNA, 499 bp, Mus musculus
  misc_feature (28)..(28): n is a, c, g, or t
  misc_feature (31)..(31): n is a, c, g, or t
  misc_feature (130)..(130): n is a, c, g, or t
  misc_feature (167)..(168): n is a, c, g, or t
  misc_feature (216)..(260): n is a, c, g, or t
gtctgaagtgtgttctgttcctagaggnctntggtaggtgatgctgcacttgcccacggagggggctcctggtatgaatatcatttcccaaacacaggaagattatgtctgcttcattgtttcacactcngggtaaaatcccattaccttcaatataactattaaanngggactgaaagccaagggaagggttacatgcctacaattccagcactnnnnnnnnnnnnnnnnnnnnnnnnnnnnnnnnnnnnnnnnnnnnngctgctagaaccaagcccattaaaatcaggaacaagataaggctgtccacgatccccacctttcttcgagatggtgcttgaagcactagataaagcagtaagataagaaaaggaaactaaacagatacaaatagaagtcaaattatccatatttgaaattgatatgacagaatacataagagactcccaaaattctactagaaaacttctagaaaagagcagtgatttcagtggcaggc

SEQ ID NO: 4615 - DNA, 499 bp, Mus musculus; identical to SEQ ID NO: 4614
  misc_feature (28)..(28): n is a, c, g, or t
  misc_feature (31)..(31): n is a, c, g, or t
  misc_feature (130)..(130): n is a, c, g, or t
  misc_feature (167)..(168): n is a, c, g, or t
  misc_feature (216)..(260): n is a, c, g, or t

SEQ ID NO: 4616 - DNA, 499 bp, Mus musculus; identical to SEQ ID NO: 4614
  misc_feature (28)..(28): n is a, c, g, or t
  misc_feature (31)..(31): n is a, c, g, or t
  misc_feature (130)..(130): n is a, c, g, or t
  misc_feature (167)..(168): n is a, c, g, or t
  misc_feature (216)..(260): n is a, c, g, or t

SEQ ID NO: 4617 - DNA, 474 bp, Mus musculus
  misc_feature (30)..(30): n is a, c, g, or t
  misc_feature (120)..(120): n is a, c, g, or t
  misc_feature (156)..(156): n is a, c, g, or t
  misc_feature (187)..(187): n is a, c, g, or t
  misc_feature (212)..(212): n is a, c, g, or t
  misc_feature (407)..(407): n is a, c, g, or t
tagctgagtctttgggggaccagctatatnccactttagcacgtccacagcatccacttacgctttgacggcaccctctcttaagtaagagtgagacgggaactcagtcagaaggtgggnatgtttttttgttaactaagttgtagaaggtcttcngtgacaaaatcagttatacatggccatctangagtgtgagaaattgaggatagggnaggaagataatcctggtatggtggacctcaatgcttcagccttgttcaaagatgtttgacatgaatatccaatgactgaaattctctcttgtctcctaatcccacttctctattcctttactcctttataccctcctcctcaaggctgctctcaaaatttgtataaaacaccattgaattcctaatctaaaggtnatacccggcaagctctagaattattgaagtatgcttccacacctggctaattatcagtcttaatatg

SEQ ID NO: 4618 - DNA, 474 bp, Mus musculus; identical to SEQ ID NO: 4617
  misc_feature (30)..(30): n is a, c, g, or t
  misc_feature (120)..(120): n is a, c, g, or t
  misc_feature (156)..(156): n is a, c, g, or t
  misc_feature (187)..(187): n is a, c, g, or t
  misc_feature (212)..(212): n is a, c, g, or t
  misc_feature (407)..(407): n is a, c, g, or t

SEQ ID NO: 4619 - DNA, 474 bp, Mus musculus; identical to SEQ ID NO: 4617
  misc_feature (30)..(30): n is a, c, g, or t
  misc_feature (120)..(120): n is a, c, g, or t
  misc_feature (156)..(156): n is a, c, g, or t
  misc_feature (187)..(187): n is a, c, g, or t
  misc_feature (212)..(212): n is a, c, g, or t
  misc_feature (407)..(407): n is a, c, g, or t

SEQ ID NO: 4620 - DNA, 559 bp, Mus musculus
  misc_feature (81)..(82): n is a, c, g, or t
  misc_feature (84)..(88): n is a, c, g, or t
  misc_feature (90)..(90): n is a, c, g, or t
  misc_feature (92)..(92): n is a, c, g, or t
  misc_feature (94)..(94): n is a, c, g, or t
  misc_feature (105)..(135): n is a, c, g, or t
  misc_feature (163)..(180): n is a, c, g, or t
  misc_feature (191)..(191): n is a, c, g, or t
  misc_feature (292)..(312): n is a, c, g, or t
  misc_feature (325)..(325): n is a, c, g, or t
  misc_feature (354)..(373): n is a, c, g, or t
  misc_feature (442)..(442): n is a, c, g, or t
  misc_feature (519)..(519): n is a, c, g, or t
gcagaacccaggttgggttcaacgaaggggaaggagttaagagcctcaaaagacaaggtgttttctgatccagagaccaanncnnnnngngngntttctagattnnnnnnnnnnnnnnnnnnnnnnnnnnnnnnnccaaaccttacaccaatggggctgcctnnnnnnnnnnnnnnnnnnaagaaggagtncactttggaagaaatttatacaaataagaactaccaatcacccacaaccagaaggacctttgagaccatctttgaggaaccacgggagcgcaatggaactnnnnnnnnnnnnnnnnnnnnnaagctccgaaggncagtagaatttcgggacagtagccttccnnnnnnnnnnnnnnnnnnnngaggggtccgcaccgcagcaagcagaacccttactcccaacctggcacccagccaggatgtggggtctntactgcaagaaaggctgagggagctagatgccttgctcctggaggaggagacagataaggaacacccttgtcacctntaggagctccaactatttgtccatccgtcctttaggtagg

SEQ ID NO: 4621 - DNA, 559 bp, Mus musculus; identical to SEQ ID NO: 4620
  misc_feature (81)..(82): n is a, c, g, or t
  misc_feature (84)..(88): n is a, c, g, or t
  misc_feature (90)..(90): n is a, c, g, or t
  misc_feature (92)..(92): n is a, c, g, or t
  misc_feature (94)..(94): n is a, c, g, or t
  misc_feature (105)..(135): n is a, c, g, or t
  misc_feature (163)..(180): n is a, c, g, or t
  misc_feature (191)..(191): n is a, c, g, or t
  misc_feature (292)..(312): n is a, c, g, or t
  misc_feature (325)..(325): n is a, c, g, or t
  misc_feature (354)..(373): n is a, c, g, or t
  misc_feature (442)..(442): n is a, c, g, or t
  misc_feature (519)..(519): n is a, c, g, or t

SEQ ID NO: 4622 - DNA, 437 bp, Mus musculus
ttcggcaatctttcctctttggggggaaaggtatctcactcaaggtgttgttgttcaactatatatatttaagtacattagaagattggattctgtcaactcttttattacctcagattatttttaaaaaataagccaataacaagttttgaaggccattttaccatccttgctcccaaacaattctgtggtgcctgacaggttaactcctgagggcttgtgtctactttttcaaagtcaacaggtttttctgtgtatgcgtgttctgtagtttccatagtaagagagaaaatatagaaatattatgcaaaaaaatatagttttctttaggtcaggaactgacatttattagtcagccatatatctatatctatatctctctatatatatatattgtttaaagaatttcaaataaagtgccaccatgtcacaccgtg

SEQ ID NO: 4623 - DNA, 437 bp, Mus musculus; identical to SEQ ID NO: 4622

SEQ ID NO: 4624 - DNA, 398 bp, Mus musculus
  misc_feature (74)..(74): n is a, c, g, or t
  misc_feature (234)..(234): n is a, c, g, or t
  misc_feature (238)..(238): n is a, c, g, or t
  misc_feature (349)..(349): n is a, c, g, or t
  misc_feature (373)..(373): n is a, c, g, or t
ttcagatctataaggctctggaggcggtatccagctgtgttcggcaaactaatggtttcgtccaaaggcacgcnccatggaaattgaactgggagagccctgaggatgctccctggctgggtaccgtgcttcacgtagccttggagtgcttgcgagtgtttggaactttgcttcagcctgttactccaaacttagcagataaactgctgtcaagactgggagtctctaccacanaganaggccttggagagctctacttcctacctcgattctatggacacccatgcccctttgaggggagaaagttgggacctgacactgggcttttgtttcctagactggaccaatntaggactcggctagtgaaagcccncaggacctaggaactcagctcttac

SEQ ID NO: 4625 - DNA, 398 bp, Mus musculus; identical to SEQ ID NO: 4624
  misc_feature (74)..(74): n is a, c, g, or t
  misc_feature (234)..(234): n is a, c, g, or t
  misc_feature (238)..(238): n is a, c, g, or t
  misc_feature (349)..(349): n is a, c, g, or t
  misc_feature (373)..(373): n is a, c, g, or t

SEQ ID NO: 4626 - DNA, 402 bp, Mus musculus
  misc_feature (274)..(274): n is a, c, g, or t
ggcctcaacgtggacttggcttttacagccatagcaaaggagctgaaacagagatcagccaaggctcccagcgagccgcgcttcaggctgcatgactatgttaagagggagggccgaggggtctcctgctgtcgactctgaaccttgctgaaactcagttccacgctggaggaagcagttctgcctttgagaattgcccgagtctatagacttgtcctcaaaggatggatgccctagtgtcttctcaaagacaccagaggctaatgcttacccntttgccccagtggccaccagaaatggtcttgaagcataaaaaccaggccacagcacattgctgccctcttctgggcactcccagaagtgaggagggggaccacacgcagcacactgctcagacaggac

SEQ ID NO: 4627 - DNA, 402 bp, Mus musculus; identical to SEQ ID NO: 4626
  misc_feature (274)..(274): n is a, c, g, or t

SEQ ID NO: 4628 - DNA, 383 bp, Mus musculus
  misc_feature (48)..(48): n is a, c, g, or t
  misc_feature (60)..(60): n is a, c, g, or t
  misc_feature (103)..(103): n is a, c, g, or t
  misc_feature (167)..(167): n is a, c, g, or t
ctccgtgacctctcggacagtgtgtggaaaccgaggctcccggacacngaagacttctcntaggggaacaacttttgggcgcacaactttctgtgcgtttttntagttttaataccttaagctttttcaagacctaactgcagccgctttgggagaaaaaaaaatancaaaacagaaaacaaacaaaaaaaaactgctttgcataaaacagtcacctgtttcctagtacctcagacttaaccaagggaattctctgcatttgtctgtactacctgtggcccttgtggttaaatgtagagagaactgctggacaggatggtgaatggagaaaaaaaaagagttttaaagaaaggaacacaaattgtgcttaaaatccccacgtg

SEQ ID NO: 4629 - DNA, 383 bp, Mus musculus; identical to SEQ ID NO: 4628
  misc_feature (48)..(48): n is a, c, g, or t
  misc_feature (60)..(60): n is a, c, g, or t
  misc_feature (103)..(103): n is a, c, g, or t
  misc_feature (167)..(167): n is a, c, g, or t

SEQ ID NO: 4630 - DNA, 338 bp, Mus musculus
  misc_feature (129)..(144): n is a, c, g, or t
  misc_feature (174)..(174): n is a, c, g, or t
  misc_feature (202)..(202): n is a, c, g, or t
  misc_feature (255)..(255): n is a, c, g, or t
  misc_feature (257)..(257): n is a, c, g, or t
gttgaattcactcaactagaagtaataggcgattttaaatctttataaatgatcttgggtaaattactggtgattgtgagggttgtttcccaatcaaaggttatttctagatggctatatgctttgttnnnnnnnnnnnnnnnncctattttccaagcattttacttaagaagnatactgtgtagttaactaaggctctttncaggccgggcttgcatcctgttgtgtattctttgtatgctgctgactatatcncnattctgctgtaagggactagatttctaatagagaacattggcatggtagctgaagcccactcctgtgcaagccatactgga

SEQ ID NO: 4631 - DNA, 338 bp, Mus musculus; identical to SEQ ID NO: 4630
  misc_feature (129)..(144): n is a, c, g, or t
  misc_feature (174)..(174): n is a, c, g, or t
  misc_feature (202)..(202): n is a, c, g, or t
  misc_feature (255)..(255): n is a, c, g, or t
  misc_feature (257)..(257): n is a, c, g, or t

SEQ ID NO: 4632 - DNA, 484 bp, Mus musculus
  misc_feature (292)..(292): n is a, c, g, or t
  misc_feature (318)..(318): n is a, c, g, or t
  misc_feature (368)..(368): n is a, c, g, or t
  misc_feature (384)..(384): n is a, c, g, or t
  misc_feature (386)..(386): n is a, c, g, or t
  misc_feature (407)..(407): n is a, c, g, or t
  misc_feature (419)..(419): n is a, c, g, or t
  misc_feature (457)..(457): n is a, c, g, or t
  misc_feature (459)..(459): n is a, c, g, or t
ttccagagaggtgcaggcagttgaagggaagaagctagcagagtcctggggtgcgatgtttatggagtcgtctgctcgggataatcagctaactcaagatgtcttcatcaaagtcatccaggagattgcccgggtggagaattcttatggacgacaagaccgccgatgctatcttatgtgaactcttggcatggaataactgccctgtttctgccgcagacattgtctaacccgcagcagtggggcagaccctcaggatataactgctatggttgccaactatgtcccctgntcctctgggcacacagtatggcactnttatttttgcacactcatcccaggttctggtagcctggatgttaatgttnacaaaggggcaagatntntcagggaccctggcttctaantccttggttttntaaaccaatttttacagtctgtacagtagggatatgantnttgtgcattgattacccaggaccca

SEQ ID NO: 4633 - DNA, 484 bp, Mus musculus; identical to SEQ ID NO: 4632
  misc_feature (292)..(292): n is a, c, g, or t
  misc_feature (318)..(318): n is a, c, g, or t
  misc_feature (368)..(368): n is a, c, g, or t
  misc_feature (384)..(384): n is a, c, g, or t
  misc_feature (386)..(386): n is a, c, g, or t
  misc_feature (407)..(407): n is a, c, g, or t
  misc_feature (419)..(419): n is a, c, g, or t
  misc_feature (457)..(457): n is a, c, g, or t
  misc_feature (459)..(459): n is a, c, g, or t

SEQ ID NO: 4634 - DNA, 595 bp, Mus musculus
  misc_feature (29)..(29): n is a, c, g, or t
  misc_feature (78)..(79): n is a, c, g, or t
  misc_feature (308)..(327): n is a, c, g, or t
  misc_feature (408)..(408): n is a, c, g, or t
  misc_feature (448)..(448): n is a, c, g, or t
  misc_feature (465)..(465): n is a, c, g, or t
ggtatcaacatcactaagtattccgaagntcttcttgctttgtttttccattttaattgatacactgacctggcccannaaaggaagagccgctctcctttgatgttattagccaacattcccacaaagtgacggtcacctgtctcagaaaggcaacaggagatatgatccgtgacattttatttgcacatgaatattttatttttgtattctggctcagctgcttctcttcgtggagttagggaggagccataaaggacttttgtaataagtaatattggcaacgcattttatactcctctatgttnnnnnnnnnnnnnnnnnnnnaaggggtgtgcgtccgagaggagggtgagcggagcttgagccagcggaatgttccatttgtctgccgcttgtgcacgagancggccagctgtagcgtctcctggaaaccaacgccccgtgntatgacgtctgtgagcntaggtttcctttcctcccctcccttcccccatcctctcctccattttctttctttctcaacccatccctttttttttttaaatcacttactgtaaataagttgtaatctaaacctcatgtatcaatgggg

SEQ ID NO: 4635 - DNA, 595 bp, Mus musculus; identical to SEQ ID NO: 4634
  misc_feature (29)..(29): n is a, c, g, or t
  misc_feature (78)..(79): n is a, c, g, or t
  misc_feature (308)..(327): n is a, c, g, or t
  misc_feature (408)..(408): n is a, c, g, or t
  misc_feature (448)..(448): n is a, c, g, or t
  misc_feature (465)..(465): n is a, c, g, or t

SEQ ID NO: 4636 - DNA, 305 bp, Mus musculus
tgtgtaaagtccttgtgtgtgccccctgctctcgtgtgcgtctgtgaaaaccaagcctaggaatactgtacatacttgaatgagaacaatcctgtgtgtgctgttactgtggtagccctgacccagtgcatattctgatttctcctgtgtaagtcccactggttgttgtttgtttgtttgtttttattttttaatttcttgtttgtttggttagtgtgaaaagtccaactgttttgcactgtgattgccgtgtcttgtattgcagatttgcctgtcgctctttgattacccgtatgccgggctgg

SEQ ID NO: 4637 - DNA, 305 bp, Mus musculus; identical to SEQ ID NO: 4636

SEQ ID NO: 4638 - DNA, 174 bp, Mus musculus
ctgtgaagtctgcttatttactgagaactgtgtatcaacttttaaacacttcccatgtgtgcagataaaaggggaatagggctttctgtagaattctatctgtctagtttgtaaagtgtcatgtgtactgcagatgtctgttctctgggctttatgttctgtacagtagatttc

SEQ ID NO: 4639 - DNA, 174 bp, Mus musculus; identical to SEQ ID NO: 4638

SEQ ID NO: 4640 - DNA, 578 bp, Mus musculus
  misc_feature (261)..(261): n is a, c, g, or t
cgggctgcattttgcatgtgaaagtttaaagaaacttgccccgtctttttccgatttcaggttgtggtgctttcgataagcttctcggagtttgccagcagctttagaaagcatcatcacctgaaactgcaaagattttgtttacctacggggagcacgcagagcccagatgacgctgtctttgcagtcaaacttttacaggtggaccctgtcagtctgcccagttcattttttgtgtcaggaccgtagctgagtcaaaanatcttttagggtaaaatgccctgtgttacaaattggactgagctgcgacacaggcttcctgccaggattgcagacttgggtaatccagagaaatgtgtattgttggtagtttctggtggtttagtttatgcttaagttaaaaagcagcattgctaaggtgttgtgtcttgattttgagctgctccagggtaaacctcctgttagcagtgaggtttgataacatgtttttaaaaccatttgtggaatattaacactagtgttctgattgcagctttaaatcagtcggatttatgaataacttcattgcttaggttgtc

SEQ ID NO: 4641 - DNA, 578 bp, Mus musculus; identical to SEQ ID NO: 4640
  misc_feature (261)..(261): n is a, c, g, or t

SEQ ID NO: 4642 - DNA, 552 bp, Mus musculus
  misc_feature (63)..(78): n is a, c, g, or t
  misc_feature (116)..(116): n is a, c, g, or t
  misc_feature (121)..(125): n is a, c, g, or t
  misc_feature (127)..(130): n is a, c, g, or t
  misc_feature (132)..(133): n is a, c, g, or t
  misc_feature (135)..(239): n is a, c, g, or t
  misc_feature (274)..(274): n is a, c, g, or t
  misc_feature (278)..(278): n is a, c, g, or t
  misc_feature (280)..(280): n is a, c, g, or t
acaccaaatgctggttgatatctcttgctggctgcccagggagccttcaccccagggctttannnnnnnnnnnnnnnnaggtctaagcccttcgcatccccaagtaaggctgagcnttttnnnnncnnnngnntnnnnnnnnnnnnnnnnnnnnnnnnnnnnnnnnnnnnnnnnnnnnnnnnnnnnnnnnnnnnnnnnnnnnnnnnnnnnnnnnnnnnnnnnnnnnnnnnnnnnnnnnngatgtatgctttgaggtggctcaggctgggctagnccancncagacagaaatcctaggcatgtgattagaggatcagaacccttctggcccttcttcaggggagagatggggctgaaggtggggttcaaatctcatgccgagtgatggaacccgacatccctaggtgctaaggccccaccaaattctctggataaggaagttccaggaatctttactgataaacatcccaatgtatcaacaaggtagactctgacctccatgggacagaagatcctgggtcagtcccctccctggggactctgcagttggctg

SEQ ID NO: 4643 - DNA, 552 bp, Mus musculus; identical to SEQ ID NO: 4642
  misc_feature (63)..(78): n is a, c, g, or t
  misc_feature (116)..(116): n is a, c, g, or t
  misc_feature (121)..(125): n is a, c, g, or t
  misc_feature (127)..(130): n is a, c, g, or t
  misc_feature (132)..(133): n is a, c, g, or t
  misc_feature (135)..(239): n is a, c, g, or t
  misc_feature (274)..(274): n is a, c, g, or t
  misc_feature (278)..(278): n is a, c, g, or t
  misc_feature (280)..(280): n is a, c, g, or t

SEQ ID NO: 4644 - DNA, 409 bp, Mus musculus
  misc_feature (81)..(81): n is a, c, g, or t
  misc_feature (98)..(98): n is a, c, g, or t
  misc_feature (102)..(102): n is a, c, g, or t
  misc_feature (210)..(210): n is a, c, g, or t
acgccactggacaactcccaggagacctgtgcgctccgtgcagctcagctcagccgcctctcaggaagcctggagcaggtntgggggacccccccccnatcnctctttacattaagctgagagttgggagaagctgtgctttggctccctgaggccaccctgatccacggggcacccgcacctctgcgttctggattcacagaccaagtntaaagcccgttcgttcctgagttgccgtcaaggcccctgaacggtactctcggtacttctgtttgttttttgtacaatttattagaaaggactgtaaaatagccacttagacactttacctctccagtatgcaaatgtaaatatattgtaatataggaaatttttgttttaatataagaatgagcctgtccagtttctg

SEQ ID NO: 4645 - DNA, 409 bp, Mus musculus; identical to SEQ ID NO: 4644
  misc_feature (81)..(81): n is a, c, g, or t
  misc_feature (98)..(98): n is a, c, g, or t
  misc_feature (102)..(102): n is a, c, g, or t
  misc_feature (210)..(210): n is a, c, g, or t

SEQ ID NO: 4646 - DNA, 589 bp, Mus musculus
  misc_feature (26)..(26): n is a, c, g, or t
  misc_feature (186)..(195): n is a, c, g, or t
  misc_feature (199)..(199): n is a, c, g, or t
  misc_feature (201)..(202): n is a, c, g, or t
  misc_feature (205)..(205): n is a, c, g, or t
  misc_feature (207)..(207): n is a, c, g, or t
  misc_feature (331)..(350): n is a, c, g, or t
  misc_feature (437)..(451): n is a, c, g, or t
accaagccagctgagtctttaatgtnaaacaaatagaaaaggaaaaaacaaaaacaagcaaacaaacaaaaaactgatgggcaaaagcaaaaaaaaaaaaagtaataataaatgtttgtaagaaaatgcaggaggaggaatgtgtatgtttaaagaataaccgtttcaataaaatatataagccannnnnnnnnnaaanannaananaatgtttttgttgcatcttgacacaagcatttagaatgctgtccaaaagtattatggatgttcgttctgtactatgctgtttggtgcagctgtggtgcctgtaaaccgtggacttgaccaaacnnnnnnnnnnnnnnnnnnnnacagcatgagaaataataaggacgtgccccaagaggactgggctattacctgccaggattgatgatgcctgctgcgaaacagactcnnnnnnnnnnnnnnnatggtcagcccgatttattattagtacgggctagtaatcaagttaaagaaaagaccagccaaatcatctgcagtaatacgcagagatataaacagcttcttcatttgaaacctttttttcaagcagatgagcaaggca

SEQ ID NO: 4647 - DNA, 589 bp, Mus musculus; identical to SEQ ID NO: 4646
  misc_feature (26)..(26): n is a, c, g, or t
  misc_feature (186)..(195): n is a, c, g, or t
  misc_feature (199)..(199): n is a, c, g, or t
  misc_feature (201)..(202): n is a, c, g, or t
  misc_feature (205)..(205): n is a, c, g, or t
  misc_feature (207)..(207): n is a, c, g, or t
  misc_feature (331)..(350): n is a, c, g, or t
  misc_feature (437)..(451): n is a, c, g, or t

SEQ ID NO: 4648 - DNA, 203 bp, Mus musculus
  misc_feature (151)..(168): n is a, c, g, or t
ggatgcaatattatcccttataatgaaatctacaaatttccaagacaacttaggctttcttaagaaccatgtgggccacttttggctgtgatcttgaaagaaaatactctgtctaaacactgcctaactgaaaacatgtgacttgagtttnnnnnnnnnnnnnnnnnnaaagttctttccattttcttagtgtactgggaatt

SEQ ID NO: 4649 - DNA, 203 bp, Mus musculus; identical to SEQ ID NO: 4648
  misc_feature (151)..(168): n is a, c, g, or t

SEQ ID NO: 4650 - DNA, 433 bp, Mus musculus
  misc_feature (26)..(27): n is a, c, g, or t
  misc_feature (32)..(32): n is a, c, g, or t
  misc_feature (35)..(40): n is a, c, g, or t
  misc_feature (43)..(43): n is a, c, g, or t
  misc_feature (49)..(49): n is a, c, g, or t
  misc_feature (344)..(344): n is a, c, g, or t
actctgttctggtgatacagctgttnnttacntgnnnnnncangtaaanaaccatgtgataaagacttaggttgattccaagcacactctctccctccaccctttcggggtgtgtgtgtgtgtgtgtgtgtgtgtgtgtgtgtgtatgtgtttgtgtgtcttcaacagagctgatacatttaagtgaatttctagttggtctatagaaagcaattttgatttttaaaaaagtgaagtaaagtctgtaggataataagtagtaaaatttatctaagtgggacctgctgcctataaactctttgaactaagacacatgttttttttgttttgttttgtttttttcngtgtgtgttattcggcacacttctcaggtataccagcagtgctgtctcccaaatatggagtgtaaggcagtctaaaagcaccttagaac

SEQ ID NO: 4651 - DNA, 433 bp, Mus musculus; identical to SEQ ID NO: 4650
  misc_feature (26)..(27): n is a, c, g, or t
  misc_feature (32)..(32): n is a, c, g, or t
  misc_feature (35)..(40): n is a, c, g, or t
  misc_feature (43)..(43): n is a, c, g, or t
  misc_feature (49)..(49): n is a, c, g, or t
  misc_feature (344)..(344): n is a, c, g, or t

SEQ ID NO: 4652 - DNA, 505 bp, Mus musculus
  misc_feature (48)..(48): n is a, c, g, or t
  misc_feature (243)..(250): n is a, c, g, or t
  misc_feature (252)..(254): n is a, c, g, or t
  misc_feature (256)..(256): n is a, c, g, or t
gctcccgttacctcggcagcagaggacagttggggccagcccggaggnaggactgcagcaggactgctgtggggagcaccttgctgctctccttcactgaccaggggtataaagctccagcagggggagtcccttgcccaggccagccaccccaggccagattccaaaactaagactttcctatctccccacacggtgctgaggctccctgctgaaatgcaattaaagcaattgattttctannnnnnnnannnantgactaccgtgcagaagggctatctttctattcacatcaaaccttttgttgcgtgtttctgttttttaatactttagggttctgatttgtgggaacagaccttgtaaataaccactgttcacatgtgtggcagaatgataaggggcccctcccagggggtgccctaaaaccagggaggtggcacagccagcccaactctctcaaccaagaaatgaccacccataagtcaactagtttgtaccttatatg

SEQ ID NO: 4653 - DNA, 505 bp, Mus musculus; identical to SEQ ID NO: 4652
  misc_feature (48)..(48): n is a, c, g, or t
  misc_feature (243)..(250): n is a, c, g, or t
  misc_feature (252)..(254): n is a, c, g, or t
  misc_feature (256)..(256): n is a, c, g, or t

SEQ ID NO: 4654 - DNA, 264 bp, Mus musculus
  misc_feature (211)..(211): n is a, c, g, or t
caagtggaaactcaggcagaagggttcctagatggctcattctgtctatgtctagctcaagtcacaattattagcagaggctgagaagaagcagacagtctctagtcctttgtgagaatctctgaggttttaactgctcacattttcctcccaccttcctccttttttccccctaaagacaatcaggggcttgccaggatgggactccagngctgcttccagcaccatccttagccctctctccagtaccctctctttggaagt

SEQ ID NO: 4655 - DNA, 264 bp, Mus musculus; identical to SEQ ID NO: 4654
  misc_feature (211)..(211): n is a, c, g, or t

SEQ ID NO: 4656 - DNA, 496 bp, Mus musculus
  misc_feature (42)..(42): n is a, c, g, or t
  misc_feature (106)..(127): n is a, c, g, or t
  misc_feature (306)..(306): n is a, c, g, or t
  misc_feature (309)..(309): n is a, c, g, or t
  misc_feature (318)..(319): n is a, c, g, or t
  misc_feature (324)..(326): n is a, c, g, or t
  misc_feature (428)..(428): n is a, c, g, or t
ggttcaagcttcctgttcctccagccaccttgtgcaggaccntttgtcctgctttcctgctgtgttgctctcttagtttgacatttgtttatggctgaccccagannnnnnnnnnnnnnnnnnnnnnatctgaatgtccctcctgacccctccaggtgtgagcaccagccattggtcccacagaccttgaggtcagagtatgtaaaaatgcttgtaaatattgtaacatactcattaatatttgaaagtcattctgtcattggcaatggaaattaattctcccaagataagcaaaaattaaataantgnttttgcacnntgaannnaagcacctaaataatgctttaacgaatcagatccccaaataaacaaacccggaaatttatgcagctattccaaccataaaattattgcggaaaaagggatantaaaagccccaaacccaccccaataaacgggaaaatttttttatttcaccaagtgatccaaggaagaa

SEQ ID NO: 4657 - DNA, 496 bp, Mus musculus; identical to SEQ ID NO: 4656
  misc_feature (42)..(42): n is a, c, g, or t
  misc_feature (106)..(127): n is a, c, g, or t
  misc_feature (306)..(306): n is a, c, g, or t
  misc_feature (309)..(309): n is a, c, g, or t
  misc_feature (318)..(319): n is a, c, g, or t
  misc_feature (324)..(326): n is a, c, g, or t
  misc_feature (428)..(428): n is a, c, g, or t

SEQ ID NO: 4658 - DNA, 482 bp, Mus musculus
  misc_feature (443)..(457): n is a, c, g, or t
gtctaatgatagctgtgcaggctttgtgctctgaggtctgtgcccgtgtaccaccccagctttcctacctgggatgagtttgggcttaacacatcagcgcccaccctgacatgctgtcagtggtgttaaagtgcaaggatgcacaggtggggaccaataagccagaggtgtgaagggcaagggtattctctgaaggagtggaggtgggagctagggattctccctacgggtaccacagcctctcccagcagcatctccagccaggtggggctgtcactgtactagctgtgagtcctgtgctaggaccccctcactccagttcgatgcactggggtcccaagcttccttgttaagtctggaaagaaatctgggtacacttgacccctgggccagtgatgacggaccgcccatcccctgtgctttgttaggctcttgtgttgtcnnnnnnnnnnnnnnngtgcccttgtatcagtattacccct

SEQ ID NO: 4659 - DNA, 482 bp, Mus musculus; identical to SEQ ID NO: 4658
  misc_feature (443)..(457): n is a, c, g, or t

SEQ ID NO: 4660 - DNA, 469 bp, Mus musculus
tgtccggctcagaccctgacaaaagacgccaccaatctgttagccacgtgctgtgacgtgatgagaactttactggaaagcccaaagagcctttaaaaagaaaatgtgtatcaattgtgttttgttacttctgtttgattagccgatggagaagtagtttggttttaggaaccactttcttctacacaaaatcttgtttttaagtccctttaagatatagccccctaaatacagaatatggcttttaaaaagaagatggagtagagaattcaattcagatttccgttttgggggaagagccctgcctctggatgactggatatgtccacgccatgcccggcctcacaatgtaggatgcagctccatgaactcattctgcaaatctttcaccttcttttcaaacgttttcaatagacacacactgtacaatccaattgttagagcactcaactactgtagagattgttat

SEQ ID NO: 4661 - DNA, 469 bp, Mus musculus; identical to SEQ ID NO: 4660

SEQ ID NO: 4662 - DNA, 249 bp, Mus musculus
cttggatccttctgccacagcttttttaagttcaggcattgtagccatcctgggtatgaaagctctttcttaattagaattacattgtactctttaggtctgtattatttattttttctagctttttttcatagtgctgggtattgaacccatggcattgtgcatttatccagcatttctttctggctcagtgaagtgaacttctctgttccacaatgttttccctgtccttatgaattgacttctctg

SEQ ID NO: 4663 - DNA, 249 bp, Mus musculus; identical to SEQ ID NO: 4662

SEQ ID NO: 4664 - DNA, 249 bp, Mus musculus; identical to SEQ ID NO: 4662

SEQ ID NO: 4665 - DNA, 369 bp, Mus musculus
  misc_feature (68)..(68): n is a, c, g, or t
  misc_feature (115)..(115): n is a, c, g, or t
gagcctagaagttctcccatctccacctaacgtgtgtggcacaatgtttggtttggttggtttttagnagtcgggaaccgctgcctacagttactcttcagttttccataggtcnatactgcggtttcctttgactcctctaaggagtcaacgagtagaaggatgagctgataaagtgatgataccgtgttaatttttacaaaatgctgtgcgtgagtgtgcatacacgtgcacatggatgtgtggatgtgtgtattctgtgtgctattttgtcaccttgatgtctcctttccaccaaagtttgcagtaatactctcttctgaaggtacgcagtcagtgttatagagactgtcatggagaagaggactc

SEQ ID NO: 4666 - DNA, 369 bp, Mus musculus; identical to SEQ ID NO: 4665
  misc_feature (68)..(68): n is a, c, g, or t
  misc_feature (115)..(115): n is a, c, g, or t

SEQ ID NO: 4667 - DNA, 369 bp, Mus musculus; identical to SEQ ID NO: 4665
  misc_feature (68)..(68): n is a, c, g, or t
  misc_feature (115)..(115): n is a, c, g, or t

SEQ ID NO: 4668 - DNA, 486 bp, Mus musculus
  misc_feature (57)..(57): n is a, c, g, or t
  misc_feature (62)..(62): n is a, c, g, or t
  misc_feature (95)..(95): n is a, c, g, or t
  misc_feature (120)..(120): n is a, c, g, or t
  misc_feature (127)..(127): n is a, c, g, or t
  misc_feature (133)..(133): n is a, c, g, or t
  misc_feature (138)..(138): n is a, c, g, or t
  misc_feature (146)..(146): n is a, c, g, or t
  misc_feature (158)..(158): n is a, c, g, or t
ttcgggaagctgaagccaggaaaagttcacttcaggaacagattgctctacataggnacagntcttttcttcacactacctgaattcctttagcnacattgcttctcagacttcaatggntcaaacnaagccnagtgngaggcttnctaaaatgcagnatgctaaccctggacagggttctctattaatgttgtgctacgaacaccattttgagaggtggaccctggttcattccaagttataccataccaagttataccaccccatcactgtgagcctctagcaaacccaaaacccttcagcttctctgtgccagcttggtgaagcagctgtctgtggtcttatttagtccctcctgttatcgctggggatatggaggggaaaccagaaacatgtcacagcttgtttacagcaagcctaagaaaaggtaaaagtgcaagtttaaaaaaaaaaatgtatcatcagctcctaagaatttcacatgtg

SEQ ID NO: 4669 - DNA, 486 bp, Mus musculus; identical to SEQ ID NO: 4668
  misc_feature (57)..(57): n is a, c, g, or t
  misc_feature (62)..(62): n is a, c, g, or t
  misc_feature (95)..(95): n is a, c, g, or t
  misc_feature (120)..(120): n is a, c, g, or t
  misc_feature (127)..(127): n is a, c, g, or t
  misc_feature (133)..(133): n is a, c, g, or t
  misc_feature (138)..(138): n is a, c, g, or t
  misc_feature (146)..(146): n is a, c, g, or t
  misc_feature (158)..(158): n is a, c, g, or t

SEQ ID NO: 4670 - DNA, 486 bp, Mus musculus; identical to SEQ ID NO: 4668
  misc_feature (57)..(57): n is a, c, g, or t
  misc_feature (62)..(62): n is a, c, g, or t
  misc_feature (95)..(95): n is a, c, g, or t
  misc_feature (120)..(120): n is a, c, g, or t
  misc_feature (127)..(127): n is a, c, g, or t
  misc_feature (133)..(133): n is a, c, g, or t
  misc_feature (138)..(138): n is a, c, g, or t
  misc_feature (146)..(146): n is a, c, g, or t
  misc_feature (158)..(158): n is a, c, g, or t

SEQ ID NO: 4671 - DNA, 511 bp, Mus musculus
  misc_feature (39)..(39): n is a, c, g, or t
  misc_feature (85)..(86): n is a, c, g, or t
  misc_feature (105)..(105): n is a, c, g, or t
  misc_feature (121)..(121): n is a, c, g, or t
  misc_feature (143)..(143): n is a, c, g, or t
  misc_feature (150)..(150): n is a, c, g, or t
  misc_feature (162)..(162): n is a, c, g, or t
  misc_feature (173)..(173): n is a, c, g, or t
  misc_feature (184)..(184): n is a, c, g, or t
  misc_feature (187)..(187): n is a, c, g, or t
  misc_feature (202)..(202): n is a, c, g, or t
  misc_feature (209)..(209): n is a, c, g, or t
ggaattgcttaccacaaatgcacttaatatgctatttangaaaattgtcttcagttttccacaaaacaaataatacttcttaaanntctacacgataaccacacnggctaggggaatcttntaatactaactcttttattttnaagcagntaagaaaatctncccaatctaancgcatcctgcnaangcttcaaatgttttntcttggnactggacttaacgattcctgtctccaacagaataacataaatcattaagaagctacttctccaaatgcattgcaagcaaaggtcattccatcagctcagtcacacctgaggctaaggactgttccccgtgcctcccagggaacctcgtggtcctgcctagcccatggtacagtaactcccaatgtacatagctcagaaggtgatgtgtttcagtcattcatgtttagaggataatttaaattaactctacgaagcaggaagttaaagtctcaaggagtaactggccaaggataaagaaacca

SEQ ID NO: 4672 - DNA, 511 bp, Mus musculus; identical to SEQ ID NO: 4671
  misc_feature (39)..(39): n is a, c, g, or t
  misc_feature (85)..(86): n is a, c, g, or t
  misc_feature (105)..(105): n is a, c, g, or t
  misc_feature (121)..(121): n is a, c, g, or t
  misc_feature (143)..(143): n is a, c, g, or t
  misc_feature (150)..(150): n is a, c, g, or t
  misc_feature (162)..(162): n is a, c, g, or t
  misc_feature (173)..(173): n is a, c, g, or t
  misc_feature (184)..(184): n is a, c, g, or t
  misc_feature (187)..(187): n is a, c, g, or t
  misc_feature (202)..(202): n is a, c, g, or t
  misc_feature (209)..(209): n is a, c, g, or t

SEQ ID NO: 4673 - DNA, 511 bp, Mus musculus; identical to SEQ ID NO: 4671
  misc_feature (39)..(39): n is a, c, g, or t
  misc_feature (85)..(86): n is a, c, g, or t
  misc_feature (105)..(105): n is a, c, g, or t
  misc_feature (121)..(121): n is a, c, g, or t
  misc_feature (143)..(143): n is a, c, g, or t
  misc_feature (150)..(150): n is a, c, g, or t
  misc_feature (162)..(162): n is a, c, g, or t
  misc_feature (173)..(173): n is a, c, g, or t
  misc_feature (184)..(184): n is a, c, g, or t
  misc_feature (187)..(187): n is a, c, g, or t
  misc_feature (202)..(202): n is a, c, g, or t
  misc_feature (209)..(209): n is a, c, g, or t

SEQ ID NO: 4674 - DNA, 394 bp, Mus musculus
  misc_feature (142)..(142): n is a, c, g, or t
  misc_feature (232)..(232): n is a, c, g, or t
gtaggctctacttaacacatcactgtacttgtaagtccagctttttttttttaaccttactttcaataattgtttgtctactgaaattactaaacatttgggctggaacatttctaaaattattaatgagtaaacatccatngttgctattatttagttacataatcacctgtaagcatgattttgagtaaaatatgcacttttatatatatttttttaatgtcccctgcanttttttttttaatgacttgagtttatttaggtttatgctctgaaagccaggtatgtcgttaagggtgactttgaactctattctctctgcccctgaagactaggattacaggcgagctccatatctgctttatgtggtgcttggattatatccattgcatgt

SEQ ID NO: 4675 - DNA, 394 bp, Mus musculus; identical to SEQ ID NO: 4674
  misc_feature (142)..(142): n is a, c, g, or t
  misc_feature (232)..(232): n is a, c, g, or t

SEQ ID NO: 4676 - DNA, 479 bp, Mus musculus
  misc_feature (32)..(33): n is a, c, g, or t
  misc_feature (48)..(48): n is a, c, g, or t
  misc_feature (56)..(56): n is a, c, g, or t
  misc_feature (80)..(80): n is a, c, g, or t
  misc_feature (82)..(82): n is a, c, g, or t
  misc_feature (107)..(107): n is a, c, g, or t
  misc_feature (121)..(121): n is a, c, g, or t
  misc_feature (126)..(126): n is a, c, g, or t
  misc_feature (129)..(129): n is a, c, g, or t
  misc_feature (134)..(134): n is a, c, g, or t
  misc_feature (140)..(140): n is a, c, g, or t
gaatctgaacagagctccctgctttctgcccnngcacactctctgtgnccatctgncccattgtcgtgcagagatactcngncaggtgtggttgtgtcagggagcangctgttcccagtgnaccanccntttgnccaccntttggaaaggaactgtcctctatcctcattcatccaagctcattgatctgtccagttccttccagaggcctctggtggccacttgtcctcagtgaaggagggcctgggtggaggagactgcctctagggttgtaagattggttgggcctgctgctatggtcagttgtcatttgttggagctgtgtttctgggaatggaagaaaggaaggcagtcatgcggtgggcgttcttcacacgagtgttaaccttacacacattctcttgtgagttgtcttttcatagctgtaggttagttgtgagttggttggtatattcattctttgatggttttacaaatgc

SEQ ID NO: 4677 - DNA, 479 bp, Mus musculus; identical to SEQ ID NO: 4676
  misc_feature (32)..(33): n is a, c, g, or t
  misc_feature (48)..(48): n is a, c, g, or t
  misc_feature (56)..(56): n is a, c, g, or t
  misc_feature (80)..(80): n is a, c, g, or t
  misc_feature (82)..(82): n is a, c, g, or t
  misc_feature (107)..(107): n is a, c, g, or t
  misc_feature (121)..(121): n is a, c, g, or t
  misc_feature (126)..(126): n is a, c, g, or t
  misc_feature (129)..(129): n is a, c, g, or t
  misc_feature (134)..(134): n is a, c, g, or t
  misc_feature (140)..(140): n is a, c, g, or t

SEQ ID NO: 4678 - DNA, 479 bp, Mus musculus; identical to SEQ ID NO: 4676
  misc_feature (32)..(33): n is a, c, g, or t
  misc_feature (48)..(48): n is a, c, g, or t
  misc_feature (56)..(56): n is a, c, g, or t
  misc_feature (80)..(80): n is a, c, g, or t
  misc_feature (82)..(82): n is a, c, g, or t
  misc_feature (107)..(107): n is a, c, g, or t
  misc_feature (121)..(121): n is a, c, g, or t
  misc_feature (126)..(126): n is a, c, g, or t
  misc_feature (129)..(129): n is a, c, g, or t
  misc_feature (134)..(134): n is a, c, g, or t
  misc_feature (140)..(140): n is a, c, g, or t

SEQ ID NO: 4679 - DNA, 545 bp, Mus musculus
  misc_feature (73)..(73): n is a, c, g, or t
  misc_feature (80)..(80): n is a, c, g, or t
  misc_feature (87)..(87): n is a, c, g, or t
  misc_feature (91)..(91): n is a, c, g, or t
  misc_feature (98)..(98): n is a, c, g, or t
  misc_feature (103)..(103): n is a, c, g, or t
  misc_feature (107)..(107): n is a, c, g, or t
  misc_feature (146)..(146): n is a, c, g, or t
  misc_feature (153)..(154): n is a, c, g, or t
  misc_feature (167)..(167): n is a, c, g, or t
  misc_feature (176)..(176): n is a, c, g, or t
  misc_feature (182)..(182): n is a, c, g, or t
  misc_feature (185)..(187): n is a, c, g, or t
  misc_feature (191)..(191): n is a, c, g, or t
  misc_feature (197)..(197): n is a, c, g, or t
  misc_feature (205)..(205): n is a, c, g, or t
  misc_feature (218)..(218): n is a, c, g, or t
  misc_feature (223)..(223): n is a, c, g, or t
  misc_feature (228)..(228): n is a, c, g, or t
  misc_feature (230)..(230): n is a, c, g, or t
  misc_feature (246)..(246): n is a, c, g, or t
  misc_feature (250)..(250): n is a, c, g, or t
  misc_feature (256)..(256): n is a, c, g, or t
  misc_feature (386)..(386): n is a, c, g, or t
  misc_feature (459)..(459): n is a, c, g, or t
ttattcccccttggtgccctaagctcccagcaccccagccttattgggctcagcagggcccactgcccccacnttcacgngggatanggancactgangccancaanggagcctcagtcctttgaggcatctgctgcctcccctangccccanncccaaacaccctnttaattttntttttnttnnngaanaaaaanctgtaaangtttttgtagctnccagncagcntntttcctgtggaaaccngggntaccancctgtatagatgctattcttgggggctgcatagccctttgcttcatgttaatggggacttccccttctgccctatgtgcaccccgccccagtttaggggtctctggggcagtggccatgttctccccctnggggggcctttggcccctagtcctgggaactctgtgcctggaaccctgcctcatctgttcctgccagaccctntgggtcaccctcccaccctggtgtctcagggctctggctcagtgggccaggatggtggggggcaggcccttcttgttgggctggat

SEQ ID NO: 4680 - DNA, 545 bp, Mus musculus; identical to SEQ ID NO: 4679
  misc_feature (73)..(73): n is a, c, g, or t
  misc_feature (80)..(80): n is a, c, g, or t
  misc_feature (87)..(87): n is a, c, g, or t
  misc_feature (91)..(91): n is a, c, g, or t
  misc_feature (98)..(98): n is a, c, g, or t
  misc_feature (103)..(103): n is a, c, g, or t
  misc_feature (107)..(107): n is a, c, g, or t
  misc_feature (146)..(146): n is a, c, g, or t
  misc_feature (153)..(154): n is a, c, g, or t
  misc_feature (167)..(167): n is a, c, g, or t
  misc_feature (176)..(176): n is a, c, g, or t
  misc_feature (182)..(182): n is a, c, g, or t
  misc_feature (185)..(187): n is a, c, g, or t
  misc_feature (191)..(191): n is a, c, g, or t
  misc_feature (197)..(197): n is a, c, g, or t
  misc_feature (205)..(205): n is a, c, g, or t
  misc_feature (218)..(218): n is a, c, g, or t
  misc_feature (223)..(223): n is a, c, g, or t
  misc_feature (228)..(228): n is a, c, g, or t
  misc_feature (230)..(230): n is a, c, g, or t
  misc_feature (246)..(246): n is a, c, g, or t
  misc_feature (250)..(250): n is a, c, g, or t
  misc_feature (256)..(256): n is a, c, g, or t
  misc_feature (386)..(386): n is a, c, g, or t
  misc_feature (459)..(459): n is a, c, g, or t

SEQ ID NO: 4681 - DNA, 391 bp, Mus musculus
  misc_feature (58)..(58): n is a, c, g, or t
  misc_feature (60)..(61): n is a, c, g, or t
tgcatgccagcctgaaagcgtcagacaccctcctccagctcagctctgagtttctttncnncgcctccttcaaactcttttgcctttaaaaaacaaacaaacaaacaaacaaccctatgacatccctagaatgttgcgaaagagccccctgctccaagttttcgtccatcagagcagcatattcctctagtctctctgcttctctttaatcctttccaatctcctcttcaccgcagcccccacgtcccaccctcaagtggctccttccctctttcctcccgctggatctgtgtctcttccctttgggtatccaggtcttcctgccccttcatcttcccagtggtctccttctgcagttatttaatgcctgtgtcagatctactgtaaaaag

SEQ ID NO: 4682 - DNA, 391 bp, Mus musculus; identical to SEQ ID NO: 4681
  misc_feature (58)..(58): n is a, c, g, or t
  misc_feature (60)..(61): n is a, c, g, or t

SEQ ID NO: 4683 - DNA, 510 bp, Mus musculus
  misc_feature (62)..(62): n is a, c, g, or t
  misc_feature (149)..(149): n is a, c, g, or t
  misc_feature (151)..(151): n is a, c, g, or t
  misc_feature (185)..(185): n is a, c, g, or t
  misc_feature (204)..(204): n is a, c, g, or t
  misc_feature (410)..(411): n is a, c, g, or t
  misc_feature (413)..(413): n is a, c, g, or t
  misc_feature (415)..(421): n is a, c, g, or t
cctttggttccctggggcactgagagcaggaggcttgtcaggggcagggtgaggagggcacntcttggctttgtgcacctgtgtccagaagagtacttactgggcacatggaggctcctgtagatgaggcccgggcccttccccaggcntntgagctcctgcccctgacccacctcccagctctntgcgtgctccttgtctcgntacctcctgtccctccacctccaggccacatcccaaacctgccctcttgctactgtaattgtaaatagagacctttcaaatgttagtggtgtaaccgtccaggaaactgttgtgtttgttgttgttgtattgatatgaaatgagattctatttttgtcaaagtatattgtaataataatgactcaaatggcccgtactgtacaaannanannnnnnngctgtgttcttgccttcctctccagactaatgctttgttgcctcctcagtggggctgcagcaagcaccaggggcagtggaagaagcatt

SEQ ID NO: 4684 - DNA, 510 bp, Mus musculus; identical to SEQ ID NO: 4683
  misc_feature (62)..(62): n is a, c, g, or t
  misc_feature (149)..(149): n is a, c, g, or t
  misc_feature (151)..(151): n is a, c, g, or t
  misc_feature (185)..(185): n is a, c, g, or t
  misc_feature (204)..(204): n is a, c, g, or t
  misc_feature (410)..(411): n is a, c, g, or t
  misc_feature (413)..(413): n is a, c, g, or t
  misc_feature (415)..(421): n is a, c, g, or t

SEQ ID NO: 4685 - DNA, 378 bp, Mus musculus
  misc_feature (255)..(255): n is a, c, g, or t
  misc_feature (267)..(267): n is a, c, g, or t
  misc_feature (327)..(343): n is a, c, g, or t
  misc_feature (350)..(350): n is a, c, g, or t
gcacactggtaccttttctatgtaatgtatgctttttattattgtagcaaagcatttcagtagaaagaattttgcaacaatatgggggaaatttttcattgtcgggtttgaattatactggattttatctgtctagtcttacttgtctttattttaatgctgtctggaagggaccttggtacccaaataaagcaggttaacctcattgcttcaagggcatacatactgtgtagtgctgagtttcacctggaaatntgatgactttgnaaagaaaaacacatttataaaaattgtacagaagaaattaaatgtgtgatggaaatcctnnnnnnnnnnnnnnnnngattttntgagacatagtgttattttcctggaatc

SEQ ID NO: 4686 - DNA, 378 bp, Mus musculus; identical to SEQ ID NO: 4685
  misc_feature (255)..(255): n is a, c, g, or t
  misc_feature (267)..(267): n is a, c, g, or t
  misc_feature (327)..(343): n is a, c, g, or t
  misc_feature (350)..(350): n is a, c, g, or t

SEQ ID NO: 4687 - DNA, 432 bp, Mus musculus
  misc_feature (41)..(41): n is a, c, g, or t
  misc_feature (298)..(298): n is a, c, g, or t
  misc_feature (308)..(308): n is a, c, g, or t
  misc_feature (324)..(324): n is a, c, g, or t
  misc_feature (335)..(335): n is a, c, g, or t
  misc_feature (362)..(362): n is a, c, g, or t
  misc_feature (405)..(405): n is a, c, g, or t
ttatcaaggagtgttattagcctactttatgggcatgctgnccattgtccacaggaggtaatgatctgctgagaagacagttgagctggtagatgggtcagtgcagttggacacaagcctaggtctgtctggcttcagagtgcacacaggagtgatgctactaagttagacttttctgattgggtcctggaattctaactttgtgtggccattcatcgatcccactaacctgcagtgacttacagcctttatgattgatgtctaagtgactacaagatgtaaactaattcactagtanatgcgatagncaaaattttatttttnttcaatatgtntttgtgagaaattaatgttttataatntcacagtatcaaaacaattcatttttgaagaaatattttattntggaagttctgacaaatgcacagaaat

SEQ ID NO: 4688 - DNA, 432 bp, Mus musculus; identical to SEQ ID NO: 4687
  misc_feature (41)..(41): n is a, c, g, or t
  misc_feature (298)..(298): n is a, c, g, or t
  misc_feature (308)..(308): n is a, c, g, or t
  misc_feature (324)..(324): n is a, c, g, or t
  misc_feature (335)..(335): n is a, c, g, or t
  misc_feature (362)..(362): n is a, c, g, or t
  misc_feature (405)..(405): n is a, c, g, or t

SEQ ID NO: 4689 - DNA, 483 bp, Mus musculus
  misc_feature (33)..(33): n is a, c, g, or t
  misc_feature (35)..(38): n is a, c, g, or t
  misc_feature (40)..(44): n is a, c, g, or t
  misc_feature (46)..(49): n is a, c, g, or t
  misc_feature (54)..(54): n is a, c, g, or t
  misc_feature (60)..(60): n is a, c, g, or t
  misc_feature (67)..(67): n is a, c, g, or t
  misc_feature (69)..(69): n is a, c, g, or t
  misc_feature (71)..(71): n is a, c, g, or t
  misc_feature (74)..(74): n is a, c, g, or t
  misc_feature (83)..(84): n is a, c, g, or t
  misc_feature (93)..(93): n is a, c, g, or t
  misc_feature (101)..(101): n is a, c, g, or t
  misc_feature (113)..(113): n is a, c, g, or t
  misc_feature (124)..(124): n is a, c, g, or t
  misc_feature (136)..(136): n is a, c, g, or t
  misc_feature (142)..(142): n is a, c, g, or t
  misc_feature (155)..(158): n is a, c, g, or t
  misc_feature (168)..(168): n is a, c, g, or t
  misc_feature (218)..(218): n is a, c, g, or t
  misc_feature (230)..(230): n is a, c, g, or t
  misc_feature (243)..(243): n is a, c, g, or t
  misc_feature (245)..(246): n is a, c, g, or t
  misc_feature (286)..(286): n is a, c, g, or t
tacccttggctttcagttgtgatggcgaaaacnannnntnnnnngnnnnactgntctagncatagtngncnttnccctccttnnccggcttcntacctcgntttgtttacatnggtttgtgtangtgcattggtgnaattgncatgtgctggctnnnngggtacttgntttaggattgacgtgctggagtgatgctaatagttcttttttctttcttntccttgatagtnaaaaacccctttnannaaacatttggaaaaatacaagtaagtaaaagatcataatncttataatgtatgatgtcatgttttaactgatgaaaatactagagtgactgtaaactaaggaaagtaactttaaggccctagtagtttggtcattatgtctgatgtagagctgctcctgacaatagaatgtttgctacttttatgtaaagacaagtgccccatcacatatgagtggccctgccatgccttgatctgg

SEQ ID NO: 4690 - DNA, 483 bp, Mus musculus; identical to SEQ ID NO: 4689
  misc_feature (33)..(33): n is a, c, g, or t
  misc_feature (35)..(38): n is a, c, g, or t
  misc_feature (40)..(44): n is a, c, g, or t
  misc_feature (46)..(49): n is a, c, g, or t
  misc_feature (54)..(54): n is a, c, g, or t
  misc_feature (60)..(60): n is a, c, g, or t
  misc_feature (67)..(67): n is a, c, g, or t
  misc_feature (69)..(69): n is a, c, g, or t
  misc_feature (71)..(71): n is a, c, g, or t
  misc_feature (74)..(74): n is a, c, g, or t
  misc_feature (83)..(84): n is a, c, g, or t
  misc_feature (93)..(93): n is a, c, g, or t
  misc_feature (101)..(101): n is a, c, g, or t
  misc_feature (113)..(113): n is a, c, g, or t
  misc_feature (124)..(124): n is a, c, g, or t
  misc_feature (136)..(136): n is a, c, g, or t
  misc_feature (142)..(142): n is a, c, g, or t
  misc_feature (155)..(158): n is a, c, g, or t
  misc_feature (168)..(168): n is a, c, g, or t
  misc_feature (218)..(218): n is a, c, g, or t
  misc_feature (230)..(230): n is a, c, g, or t
  misc_feature (243)..(243): n is a, c, g, or t
  misc_feature (245)..(246): n is a, c, g, or t
  misc_feature (286)..(286): n is a, c, g, or t

SEQ ID NO: 4691 - DNA, 483 bp, Mus musculus; identical to SEQ ID NO: 4689
  misc_feature (33)..(33): n is a, c, g, or t
  misc_feature (35)..(38): n is a, c, g, or t
  misc_feature (40)..(44): n is a, c, g, or t
  misc_feature (46)..(49): n is a, c, g, or t
  misc_feature (54)..(54): n is a, c, g, or t
  misc_feature (60)..(60): n is a, c, g, or t
  misc_feature (67)..(67): n is a, c, g, or t
  misc_feature (69)..(69): n is a, c, g, or t
  misc_feature (71)..(71): n is a, c, g, or t
  misc_feature (74)..(74): n is a, c, g, or t
  misc_feature (83)..(84): n is a, c, g, or t
  misc_feature (93)..(93): n is a, c, g, or t
  misc_feature (101)..(101): n is a, c, g, or t
  misc_feature (113)..(113): n is a, c, g, or t
  misc_feature (124)..(124): n is a, c, g, or t
  misc_feature (136)..(136): n is a, c, g, or t
  misc_feature (142)..(142): n is a, c, g, or t
  misc_feature (155)..(158): n is a, c, g, or t
  misc_feature (168)..(168): n is a, c, g, or t
  misc_feature (218)..(218): n is a, c, g, or t
  misc_feature (230)..(230): n is a, c, g, or t
  misc_feature (243)..(243): n is a, c, g, or t
  misc_feature (245)..(246): n is a, c, g, or t
  misc_feature (286)..(286): n is a, c, g, or t

SEQ ID NO: 4692 - DNA, 388 bp, Mus musculus
  misc_feature (93)..(112): n is a, c, g, or t
  misc_feature (212)..(255): n is a, c, g, or t
  misc_feature (270)..(271): n is a, c, g, or t
  misc_feature (276)..(276): n is a, c, g, or t
  misc_feature (283)..(283): n is a, c, g, or t
  misc_feature (297)..(297): n is a, c, g, or t
  misc_feature (316)..(316): n is a, c, g, or t
  misc_feature (324)..(324): n is a, c, g, or t
  misc_feature (350)..(350): n is a, c, g, or t
gaactacagtggaggacactgaaaaattagatcaattctagatattttatattttcaaaatatggtacttaactagaccttggaaatcttagnnnnnnnnnnnnnnnnnnnngcagacatgcgtagtgctcagaaatgtagataaatagtgttttacgatattggtggggctgagttcccatgccgcggtcattcctgtactctgttatgcnnnnnnnnnnnnnnnnnnnnnnnnnnnnnnnnnnnnnnnnnnnntgaccgaggcattgnnttgtntgttagntaagggggaagcantcttttgaatcaaatgatntttgctcntagtttgacaaagataacatttttantcatatgtaagaacgcgcagtctcattatgtctggtta

SEQ ID NO: 4693 - DNA, 388 bp, Mus musculus; identical to SEQ ID NO: 4692
  misc_feature (93)..(112): n is a, c, g, or t
  misc_feature (212)..(255): n is a, c, g, or t
  misc_feature (270)..(271): n is a, c, g, or t
  misc_feature (276)..(276): n is a, c, g, or t
  misc_feature (283)..(283): n is a, c, g, or t
  misc_feature (297)..(297): n is a, c, g, or t
  misc_feature (316)..(316): n is a, c, g, or t
  misc_feature (324)..(324): n is a, c, g, or t
  misc_feature (350)..(350): n is a, c, g, or t

SEQ ID NO: 4694 - DNA, 553 bp, Mus musculus
  misc_feature (244)..(259): n is a, c, g, or t
  misc_feature (289)..(289): n is a, c, g, or t
  misc_feature (292)..(292): n is a, c, g, or t
gaagggcttcctaggtacggatcctcccccacttccctagcaggtcggttcccatatgctcacttcctctcagctggaggactggtgcacattgtgtgctctggacacaagctctctggacaagatctcagaggagcagagggcagattgctgagtatctaacggtagagacatgcatggaacccaatacagcaagagcctgaagtttaaatctgtcagaccggaggctggacaagtggacaannnnnnnnnnnnnnnntaaggtggtgggctggctcaggccttggcntgncaccagtgagtaaggaaccttggaaacataacaagttgccacagagttcttaccatcatgttctgcaccaaagacctcggtttgtagaagcccaaggaaactgcagagggctcctgacttgagagaccagatggagccactatgttgtcacccccagtcctagctgacggtatatctgccaggttccggagcagtgtccagccatatataccggtgtgctttaacctgctgtgtgagcatattgttctactgtatgatcaa

SEQ ID NO: 4695 - DNA, 553 bp, Mus musculus; identical to SEQ ID NO: 4694
  misc_feature (244)..(259): n is a, c, g, or t
  misc_feature (289)..(289): n is a, c, g, or t
  misc_feature (292)..(292): n is a, c, g, or t

SEQ ID NO: 4696 - DNA, 596 bp, Mus musculus
  misc_feature (26)..(26): n is a, c, g, or t
  misc_feature (33)..(34): n is a, c, g, or t
  misc_feature (36)..(36): n is a, c, g, or t
  misc_feature (47)..(47): n is a, c, g, or t
  misc_feature (49)..(49): n is a, c, g, or t
  misc_feature (117)..(117): n is a, c, g, or t
  misc_feature (150)..(150): n is a, c, g, or t
  misc_feature (237)..(237): n is a, c, g, or t
  misc_feature (239)..(240): n is a, c, g, or t
  misc_feature (243)..(245): n is a, c, g, or t
  misc_feature (350)..(351): n is a, c, g, or t
  misc_feature (353)..(363): n is a, c, g, or t
  misc_feature (528)..(550): n is a, c, g, or t
gtgtccaggatcttgttaccttgctnttctaanntngttctttgttntntctgaggactggagaggggttcggcctcagtaggtgttggggaggctgccagagggggctgcgcgggntaagccaggcctccccctccttccacctgtctnatccccacttcctgtgagcaccacatccctcagtttgcccaaagtgagacatttacaaaacaataaaaatacttttctaaagagcanannaannntttttatggttgttggaaatgactttatatgtcagttttttgtggtttgcatttttctttgaatattttctgtatgcacatgtagttaaaaaaaatattccaaannannnnnnnnnnntgtttccttaccagaagacagcctcatggtggggctccctgtgctctgttagcctctcttgctgaccagcctgtgcctcatgccccaggcctatagccctgtgaagcacccggatagagaagctagactaactctaaagggaagctgattccacagtttggtctnnnnnnnnnnnnnnnnnnnnnnnactcacacacaaaccatggcatgcgcgcgcgcacacacaagctaat

SEQ ID NO: 4697 - DNA, 596 bp, Mus musculus; identical to SEQ ID NO: 4696
  misc_feature (26)..(26): n is a, c, g, or t
  misc_feature (33)..(34): n is a, c, g, or t
  misc_feature (36)..(36): n is a, c, g, or t
  misc_feature (47)..(47): n is a, c, g, or t
  misc_feature (49)..(49): n is a, c, g, or t
  misc_feature (117)..(117): n is a, c, g, or t
  misc_feature (150)..(150): n is a, c, g, or t
  misc_feature (237)..(237): n is a, c, g, or t
  misc_feature (239)..(240): n is a, c, g, or t
  misc_feature (243)..(245): n is a, c, g, or t
  misc_feature (350)..(351): n is a, c, g, or t
  misc_feature (353)..(363): n is a, c, g, or t
  misc_feature (528)..(550): n is a, c, g, or t

SEQ ID NO: 4698 - DNA, 337 bp, Mus musculus
  misc_feature (220)..(239): n is a, c, g, or t
  misc_feature (246)..(247): n is a, c, g, or t
  misc_feature (249)..(249): n is a, c, g, or t
  misc_feature (253)..(253): n is a, c, g, or t
  misc_feature (259)..(265): n is a, c, g, or t
  misc_feature (267)..(269): n is a, c, g, or t
  misc_feature (299)..(299): n is a, c, g, or t
  misc_feature (309)..(309): n is a, c, g, or t
ccaccttgccagctagcagctttgttccctcttccatccttaatggcctctaattcatgatgggacttagggacatggccacctcctcattatggggacactggcctaaattgcatcaaggacttgattgcaggtcggggctcaaagccagtctgccccatagtgaccggtgtgctcttctgtcccatgtcaccctgggcagtgaaggtcttcatccccnnnnnnnnnnnnnnnnnnnncactggnntnttgnttgagnnnnnnngnnngctgcacgcttcatagagcctggctcaggncctctagggntacactgccttctcagttctccctgggg

SEQ ID NO: 4699 - DNA, 337 bp, Mus musculus; identical to SEQ ID NO: 4698
  misc_feature (220)..(239): n is a, c, g, or t
  misc_feature (246)..(247): n is a, c, g, or t
  misc_feature (249)..(249): n is a, c, g, or t
  misc_feature (253)..(253): n is a, c, g, or t
  misc_feature (259)..(265): n is a, c, g, or t
  misc_feature (267)..(269): n is a, c, g, or t
  misc_feature (299)..(299): n is a, c, g, or t
  misc_feature (309)..(309): n is a, c, g, or t

SEQ ID NO: 4700 - DNA, 180 bp, Mus musculus
  misc_feature (107)..(130): n is a, c, g, or t
  misc_feature (140)..(154): n is a, c, g, or t
aagatcaagactaccatggtcatttcaacgaaatcctggcatatgcatccatttatcagttggtggaataatgatagtatttacaattgttctaaaacatccaaaannnnnnnnnnnnnnnnnnnnnnnnaaaggaaagnnnnnnnnnnnnnnngtggggcattcaacttgtattaaaac

SEQ ID NO: 4701 - DNA, 180 bp, Mus musculus; identical to SEQ ID NO: 4700
  misc_feature (107)..(130): n is a, c, g, or t
  misc_feature (140)..(154): n is a, c, g, or t

SEQ ID NO: 4702 - DNA, 208 bp, Mus musculus
  misc_feature (156)..(171): n is a, c, g, or t
gcccctgctcttccagacaagtgaacatgtggccgacagccccgcagtgggagacattataccattcagcatcatcattcagtttctgttcacaagagcaccagctgagctggaatcccccttccagagggcagaatggtctcatgctcgcttctnnnnnnnnnnnnnnnntcacccatctgaaaaggacaggctgctcctcctcagg

SEQ ID NO: 4703 - DNA, 208 bp, Mus musculus; identical to SEQ ID NO: 4702
  misc_feature (156)..(171): n is a, c, g, or t

SEQ ID NO: 4704 - DNA, 423 bp, Mus musculus
  misc_feature (246)..(266): n is a, c, g, or t
  misc_feature (333)..(349): n is a, c, g, or t
acctgtaggtggagaattggcccagtgggtaacaaatacttggaagtttctttgaaaaattcagtccctccttttcctattctcgttttctcccttccctgatagtgaaggcttgcttttcttcaccccttgagcgaagtggtcctttgctaccttctgttttccctctggtcttgctcttctgtggattcatgtgggagcgatatgttatttaagtaaagttactgttaaacttagtttatattnnnnnnnnnnnnnnnnnnnnntaatacgttttaagttacttttcaagcttgtacttaaggtttagttttttttctctagttgttagtnnnnnnnnnnnnnnnnntgagcctccttttagcagagtgaaccccttttaaaaggccactttaacaacaaccaccaatatgttgtttagag

SEQ ID NO: 4705 - DNA, 423 bp, Mus musculus; identical to SEQ ID NO: 4704
  misc_feature (246)..(266): n is a, c, g, or t
  misc_feature (333)..(349): n is a, c, g, or t

SEQ ID NO: 4706 - DNA, 343 bp, Mus musculus
  misc_feature (91)..(222): n is a, c, g, or t
  misc_feature (292)..(306): n is a, c, g, or t
acagttggcgggtctccctacaggatgtgatatagtcacagtgagtctccctttctttctttcttttttattttttgtttgtttgtttttnnnnnnnnnnnnnnnnnnnnnnnnnnnnnnnnnnnnnnnnnnnnnnnnnnnnnnnnnnnnnnnnnnnnnnnnnnnnnnnnnnnnnnnnnnnnnnnnnnnnnnnnnnnnnnnnnnnnnnnnnnnnnnnnnnnngagtctccctttcttaaccccatgaggataatccttcgccaccatgatgtgctctcctaactcattttgnnnnnnnnnnnnnnnacacgtcctcttttcatagacaaggaaactgagaaca

SEQ ID NO: 4707 - DNA, 343 bp, Mus musculus; identical to SEQ ID NO: 4706
  misc_feature (91)..(222): n is a, c, g, or t
  misc_feature (292)..(306): n is a, c, g, or t

SEQ ID NO: 4708 - DNA, 478 bp, Mus musculus
  misc_feature (94)..(94): n is a, c, g, or t
  misc_feature (176)..(192): n is a, c, g, or t
  misc_feature (379)..(396): n is a, c, g, or t
  misc_feature (413)..(434): n is a, c, g, or t
tatgggcctgaattctatgcagtgaccagtttcccctaccccaccacgggcaccgccgttgcctaccggggtgcacacctgcggggccggggcngtgctgtgtataatacatttcgagctgcaccacctccaccccccattccaacttatggagcggcactggagcaaacgcttgnnnnnnnnnnnnnnnnntgggcggggctggcaccgtgccccctccctcctcagcagacaccggagccggcctaccccacctctccagcgttcccaccactctcttgtccgtttgcttccagggtcgtgtatcaggatggattttatggtgctgagatttatggaggctatgcagcttacagatatgctcagccagcagccgccnnnnnnnnnnnnnnnnnngacagttatggtagagnnnnnnnnnnnnnnnnnnnnnnccatcacaccatcggccccacagcaacctacagcatcggaacca

SEQ ID NO: 4709 - DNA, 478 bp, Mus musculus; identical to SEQ ID NO: 4708
  misc_feature (94)..(94): n is a, c, g, or t
  misc_feature (176)..(192): n is a, c, g, or t
  misc_feature (379)..(396): n is a, c, g, or t
  misc_feature (413)..(434): n is a, c, g, or t

SEQ ID NO: 4710 - DNA, 446 bp, Mus musculus
  misc_feature (68)..(68): n is a, c, g, or t
  misc_feature (72)..(72): n is a, c, g, or t
  misc_feature (116)..(116): n is a, c, g, or t
  misc_feature (139)..(162): n is a, c, g, or t
  misc_feature (357)..(357): n is a, c, g, or t
  misc_feature (367)..(367): n is a, c, g, or t
  misc_feature (377)..(377): n is a, c, g, or t
tgaatgcggtttctctgtgtagctctgagagttcgtttcatagaacacaacacttgagcagatgcatncaangaggcgagcaaatgaaaaggaatctatttatggaataaactcgnaaacctaaatttcagtattttannnnnnnnnnnnnnnnnnnnnnnntatttattaaaatgtataacaatgtgatttttcaatggtattagttcaaattgacgtggattcatgccacatggaaatctttaatttatttgttgaggtaccatatagccagggtgctaggtgatgagtggtgttagcatgtgcaataggaactactggtttgctgtgtaaatggatgtcaggatccagcaaaantactgctttnttctccaaanacatgtgggagccttcaatcctcagtggcatgggaaacagctgagtacttgccccgtgacttcagtttt

SEQ ID NO: 4711 - DNA, 446 bp, Mus musculus; identical to SEQ ID NO: 4710
  misc_feature (68)..(68): n is a, c, g, or t
  misc_feature (72)..(72): n is a, c, g, or t
  misc_feature (116)..(116): n is a, c, g, or t
  misc_feature (139)..(162): n is a, c, g, or t
  misc_feature (357)..(357): n is a, c, g, or t
  misc_feature (367)..(367): n is a, c, g, or t
  misc_feature (377)..(377): n is a, c, g, or t

SEQ ID NO: 4712 - DNA, 458 bp, Mus musculus
  misc_feature (244)..(263): n is a, c, g, or t
  misc_feature (273)..(291): n is a, c, g, or t
  misc_feature (304)..(304): n is a, c, g, or t
  misc_feature (368)..(368): n is a, c, g, or t
  misc_feature (407)..(407): n is a, c, g, or t
  misc_feature (411)..(428): n is a, c, g, or t
gcttaagatgctgcagtcgtgttactgtgaaggaaaattcttccactttcagcagggtgtgtgggtgtgcgtgtgtgctcgcatgtgtgttcattttggctttttaaaaatgttgaaaatcgaggagaacttgattaccttcacagattatttatagatacactgggcgtgatgcttacgtaggcaagcaccggggaacaggagttcagtgctccggtcatgtaataccttgtctatgccccannnnnnnnnnnnnnnnnnnntgtgtcctannnnnnnnnnnnnnnnnnnttataatgctaancagaaactggtttgttttgtaatggaatacaaagaagatgtataataggaccaggattgtcccncacttgtaaataagaatgggccctgtttattttgacatntttnnnnnnnnnnnnnnnnnnaggatgtgaatattccaaaacatgctcttg

SEQ ID NO: 4713 - DNA, 458 bp, Mus musculus; identical to SEQ ID NO: 4712
  misc_feature (244)..(263): n is a, c, g, or t
  misc_feature (273)..(291): n is a, c, g, or t
  misc_feature (304)..(304): n is a, c, g, or t
  misc_feature (368)..(368): n is a, c, g, or t
  misc_feature (407)..(407): n is a, c, g, or t
  misc_feature (411)..(428): n is a, c, g, or t

SEQ ID NO: 4714 - DNA, 366 bp, Mus musculus
  misc_feature (184)..(184): n is a, c, g, or t
  misc_feature (186)..(186): n is a, c, g, or t
  misc_feature (218)..(218): n is a, c, g, or t
  misc_feature (227)..(227): n is a, c, g, or t
gctgttcttaaaactagctctattgattgtacatcgtcacagattttagttaacaattttattttgtattcttgcagttttaagtggatgctaacattagggacataatgtttttatggccctgtggcagatcttctgaactatgcacacttgtgcttttttttgtaagtttggaccaactttnangtaaacaagctccccttccccccatgcccccnatccccctnccagttttacaacaatcagaaagggcactgatttatttggtattttctttttacaaagctacctttagtcgaaggtcactgtcagtctttgcacctgctttcagtgttattgtgaaaggtgtactttgtgctcatttca

SEQ ID NO: 4715 - DNA, 366 bp, Mus musculus; identical to SEQ ID NO: 4714
  misc_feature (184)..(184): n is a, c, g, or t
  misc_feature (186)..(186): n is a, c, g, or t
  misc_feature (218)..(218): n is a, c, g, or t
  misc_feature (227)..(227): n is a, c, g, or t

SEQ ID NO: 4716 - DNA, 547 bp, Mus musculus
  misc_feature (337)..(337): n is a, c, g, or t
  misc_feature (470)..(470): n is a, c, g, or t
  misc_feature (505)..(505): n is a, c, g, or t
atcaaaaagagcactgttcccgtcagccactattttatgatgtctgaggcacacccctttctgaattccaaggaccaaggtgacatgacctgtgtatgggagtgcccaatagtgtttggcttttcttaacattccttcctttttgttgttgttgttttgttttcctttttaatgaactaaataccaatagatgcaacttagtttttgtaatactgaaatcgattcaattgtataaatgattataatttctttcatggaagcatgatccttctgattaagaactgtaccccatattttatgctggttgtctgcaagcttgtgcgatgatgttatgttnatgttaatcctatttgtaaaatgaagtgttcctgaccttatgttaaaaagagagaagtaaataacagacattattcagttattttgtcctttatcgaaaaaccagatttcatttttcctttttgtttgtgatntcatttggaaataattggcaagttgaggtactttnttcccatgctttgtacaatataaactgttatgcctttcagtg

SEQ ID NO: 4717 - DNA, 547 bp, Mus musculus; identical to SEQ ID NO: 4716
  misc_feature (337)..(337): n is a, c, g, or t
  misc_feature (470)..(470): n is a, c, g, or t
  misc_feature (505)..(505): n is a, c, g, or t

SEQ ID NO: 4718 - DNA, 293 bp, Mus musculus
  misc_feature (179)..(179): n is a, c, g, or t
  misc_feature (220)..(220): n is a, c, g, or t
gtttgcacacaacatatagcagatcaccttgtcctgtgtcctgtgtcctgtgtcctgtgccagtctgggctgcccatctaagcagtgacttgattctgtacctgcctgacctgtctaaatgcagtccaactttacactcatcctgactgcatctaagtgtgcaatgactaccttgattnatctcctgtggaaaactataaaatctgacagctctgcaggnttacattctgaagatgcagtttgtgtgctcgcctgtgcaccctccacttctgtagctctgactccacattcag

SEQ ID NO: 4719 - DNA, 293 bp, Mus musculus; identical to SEQ ID NO: 4718
  misc_feature (179)..(179): n is a, c, g, or t
  misc_feature (220)..(220): n is a, c, g, or t

SEQ ID NO: 4720 - DNA, 438 bp, Mus musculus
  misc_feature (72)..(72): n is a, c, g, or t
  misc_feature (79)..(79): n is a, c, g, or t
  misc_feature (90)..(90): n is a, c, g, or t
  misc_feature (237)..(237): n is a, c, g, or t
  misc_feature (255)..(255): n is a, c, g, or t
  misc_feature (279)..(279): n is a, c, g, or t
gactatgtaggctcactttcaaacatttaactcgttcttcttcttttttttaagctctcctgggctcacacnacactanacactgtcaangagagaaatctctttactgacactgccagtcccttctaaccctgccagtcactgacataaaacatgtgtgtcccaagagttgccttgcttcaaacaggaactgcatctccaggtgtaccctccaggtagccagtctggtcaggctcnttaccacattgttacggngtccccaagcagatctggcatgcncttctcagtgctcatgagccaaagcaggaactataaggggctcgccactttcagcctatgaagtagggtttatgggtcacctgacatggctcctatctgcctggcctgggactctgtcacggtctcacaagcaccggcttccccagcagttcacgtgta

SEQ ID NO: 4721 - DNA, 438 bp, Mus musculus; identical to SEQ ID NO: 4720
  misc_feature (72)..(72): n is a, c, g, or t
  misc_feature (79)..(79): n is a, c, g, or t
  misc_feature (90)..(90): n is a, c, g, or t
  misc_feature (237)..(237): n is a, c, g, or t
  misc_feature (255)..(255): n is a, c, g, or t
  misc_feature (279)..(279): n is a, c, g, or t

SEQ ID NO: 4722 - DNA, 306 bp, Mus musculus
gtctcagattacacttgcccattgtttcagatcgttctactctgtctccctttaagtgacctgtgaccctcccagatgccttcttggtattggccctttaacaaagcctgggtgattttcttaagtgaatgcgaggagctacagaagacaaggatatctgtgtgtgaatccattttggacataatgatctctttgtccagaactagctacggaggcatcaacagaacgctggacattcctgtgactctgggataaacctttatgtctgtgtcatgagatgaacctgtgccccagatggcttttaag

SEQ ID NO: 4723 - DNA, 306 bp, Mus musculus; identical to SEQ ID NO: 4722

SEQ ID NO: 4724 - DNA, 417 bp, Mus musculus
  misc_feature (41)..(41): n is a, c, g, or t
ggatttttcccacatttgtgtattccaaatctacatttctnctgtgcttgtgaagacagctgtatcacaggctcaaagagacagttgtaaacagtacactccaaaacccagtaaaatacatccatcttccatgatgaaccaaactcagtagtttatctcaggagcaaacacgcattgtgagatgttttctactgtccagcacagagttgtcagtcatttcttgggcttgaagggaatagatgggaaatccagttcaacttgctcttccactgcttagtctctgggtagagaatttatggtacagactagcagcaagaggaatagcattttctgtagctacagcagccagagccatatccacagccatacctggagccatatccacaaccatagcctgagccatatccacagccatat

SEQ ID NO: 4725 - DNA, 417 bp, Mus musculus; identical to SEQ ID NO: 4724
  misc_feature (41)..(41): n is a, c, g, or t

SEQ ID NO: 4726 - DNA, 577 bp, Mus musculus
  misc_feature (33)..(33): n is a, c, g, or t
  misc_feature (159)..(159): n is a, c, g, or t
  misc_feature (203)..(203): n is a, c, g, or t
  misc_feature (209)..(234): n is a, c, g, or t
  misc_feature (236)..(237): n is a, c, g, or t
  misc_feature (244)..(245): n is a, c, g, or t
  misc_feature (259)..(259): n is a, c, g, or t
  misc_feature (269)..(269): n is a, c, g, or t
  misc_feature (372)..(372): n is a, c, g, or t
  misc_feature (389)..(389): n is a, c, g, or t
  misc_feature (399)..(399): n is a, c, g, or t
  misc_feature (410)..(410): n is a, c, g, or t
  misc_feature (417)..(417): n is a, c, g, or t
  misc_feature (426)..(444): n is a, c, g, or t
  misc_feature (461)..(461): n is a, c, g, or t
  misc_feature (465)..(465): n is a, c, g, or t
gagagctcccacgaaggcctcatcacggatccncacagcccctctcgcttccgggtcatcggctcgctctccaactccaaggagttctcagaacactttcgctgcccgcctggctctcccatgaaccctcatcacaagtgcgaagtctggtaagggctnaagcgcagagagcacggacagaaaaagggaaggagctgcagctngctccnnnnnnnnnnnnnnnnnnnnnnnnnncnnccagccnntcggcctagggccncttccccacnctggagagtatgcagccatcctaagcctaagatggatggagcctcaccactcgaagccaagatttgaccccctgtgaagctccggcatcctggacaccggtgngtgatgctaggcgggcntttggatgtntcaagctggtngcttgcnagccctggnnnnnnnnnnnnnnnnnnnagtgggacatggccccntgcncacatccaatgccagatacaccacaataccactgtgtcaaatgctttaaagatatatttttggggagactattttttaagcattatggaatacactggaaatcttcagggaa

SEQ ID NO: 4727 - DNA, 577 bp, Mus musculus; identical to SEQ ID NO: 4726
  misc_feature (33)..(33): n is a, c, g, or t
  misc_feature (159)..(159): n is a, c, g, or t
  misc_feature (203)..(203): n is a, c, g, or t
  misc_feature (209)..(234): n is a, c, g, or t
  misc_feature (236)..(237): n is a, c, g, or t
  misc_feature (244)..(245): n is a, c, g, or t
  misc_feature (259)..(259): n is a, c, g, or t
  misc_feature (269)..(269): n is a, c, g, or t
  misc_feature (372)..(372): n is a, c, g, or t
  misc_feature (389)..(389): n is a, c, g, or t
  misc_feature (399)..(399): n is a, c, g, or t
  misc_feature (410)..(410): n is a, c, g, or t
  misc_feature (417)..(417): n is a, c, g, or t
  misc_feature (426)..(444): n is a, c, g, or t
  misc_feature (461)..(461): n is a, c, g, or t
  misc_feature (465)..(465): n is a, c, g, or t

SEQ ID NO: 4728 - DNA, 595 bp, Mus musculus
  misc_feature (91)..(91): n is a, c, g, or t
  misc_feature (195)..(195): n is a, c, g, or t
  misc_feature (301)..(301): n is a, c, g, or t
ggaaagtataccatccacccagtcctcctcagccctgcttcacacaaaccaggagagaccaacactgtgactcccagttggcaggtgcccnatgtagccatctaatttcccagggagacaagtattcaacaaagctcatgtgccaagcttccctgccacgggaaaccaaacagtgcccaccaccctggcaactantgctgtcccatccctgaggtttgtgaccaccaccactgtgcaacttatcacaaggaaaagggtcgctgggaaagggagagttgagtcagccgtgcagtcccgaagnctccttctgtcagcatgttgtagctggtttcagaggacaatgcccttgatgtcccatttgtagacatagctgcttcctggcagagtcctgtgcaggggagtgcccaaggagtcatttcctgacaccttgtagtgggctgtcccagtctctgcttgcctacatccgaagcaatgctccaccaagtactctttcctttatcagtttcagggatctcatttcaggaaaggagaaggccgccatcatctccgtgcccatatatgtgtacccttctgtctgtgcattccacgaaccaag

SEQ ID NO: 4729 - DNA, 595 bp, Mus musculus; identical to SEQ ID NO: 4728
  misc_feature (91)..(91): n is a, c, g, or t
  misc_feature (195)..(195): n is a, c, g, or t
  misc_feature (301)..(301): n is a, c, g, or t

SEQ ID NO: 4730 - DNA, 494 bp, Mus musculus
  misc_feature (43)..(43): n is a, c, g, or t
  misc_feature (348)..(348): n is a, c, g, or t
aaagctggctgctgccctcagtgtagagtaccacgacacttcnacgcaagtccagagtctccaggctgagacggaatctttacgggctctgaaacgaggcctggaaaacagcttgcacgacggcccagcactggcatgacatggaactgcagaacctgggtgccgtggtgggcaggctggaggcagagctggcagagatccgctcagagacagaacagcagcagcaggagcgggcacacctgctggcgtgcaagagccagctacagaaggatgtggcatcctaccacgccctgctggacagagaggagaacaactaatgggaaaaccaaaaaacgacttcctcttttnacaaagaaaactctgccttcctcggcagcccaccggtgacgtctgaagaacctcagtggctgctggactccctagctgactcagacggagctccctgggggtggagagaattctgctcccatttctgtagtctgtagcttgaacaa

SEQ ID NO: 4731 - DNA, 494 bp, Mus musculus; identical to SEQ ID NO: 4730
  misc_feature (43)..(43): n is a, c, g, or t
  misc_feature (348)..(348): n is a, c, g, or t

SEQ ID NO: 4732 - DNA, 556 bp, Mus musculus
  misc_feature (73)..(93): n is a, c, g, or t
  misc_feature (125)..(125): n is a, c, g, or t
  misc_feature (187)..(237): n is a, c, g, or t
  misc_feature (406)..(433): n is a, c, g, or t
caggattgctacagcgcccgggaaccgaacctgggcattcagccgggtcctcgggctctcgaacgctactttnnnnnnnnnnnnnnnnnnnnngtcccagctctgcctccacagggtggcgacanggacgcttggaggtccagatgcgggcacgcagtgcggggaagcctacagcaccgccctggcnnnnnnnnnnnnnnnnnnnnnnnnnnnnnnnnnnnnnnnnnnnnnnnnnnncctcccgagtcgcggtcgcctgctccagctggcgtgtcccggaacaggagaggcggacgcgcgggttgctctggcccgggccgccggcgtcctggaggatgtgtacaatcgtacccagggcctgctggccggccacggcctgctccagctggcttgatggccgcggcannnnnnnnnnnnnnnnnnnnnnnnnnnngggaagggatgtacatactcagggttaccggcggcctgagagtagctagcggtcctctttagtgaagtcaccacagttaaggcccacccccagcagggcagtctcagtgatgtgtgagatcct

SEQ ID NO: 4733 - DNA, 556 bp, Mus musculus; identical to SEQ ID NO: 4732
  misc_feature (73)..(93): n is a, c, g, or t
  misc_feature (125)..(125): n is a, c, g, or t
  misc_feature (187)..(237): n is a, c, g, or t
  misc_feature (406)..(433): n is a, c, g, or t

SEQ ID NO: 4734 - DNA, 476 bp, Mus musculus
  misc_feature (89)..(89): n is a, c, g, or t
acacacctctgtgtctcaggctcattaaagtgtttgtcctgacctcaaatttccaggcagtcagagtgaccctgaacacaaaccggagnctctccctgttggtcgtgctaagtggcttactgctggagagcattgtggtcttcttcttccagaggatggagtgggatgtgagcagtgactgtgcgctctacaagtctcaggacttctgaaggaccagctacctcaaaagagaaggcacaaaagaacccaaggtctctgctttctgtgagtgaagccaagactggggatttctgaacgtacccagacaccccagaagatctgaaccacctataccaaggctgaacgctctcaggcagcactgtggttcccttataggaatgatagctctgagctccatccttcctgctctttagtgtaatattttattacactggtggctttaaccctgtattttgtgtctttctgacagaagcact

SEQ ID NO: 4735 - DNA, 476 bp, Mus musculus; identical to SEQ ID NO: 4734
  misc_feature (89)..(89): n is a, c, g, or t

SEQ ID NO: 4736 - DNA, 277 bp, Mus musculus
  misc_feature (82)..(111): n is a, c, g, or t
  misc_feature (132)..(134): n is a, c, g, or t
  misc_feature (136)..(136): n is a, c, g, or t
  misc_feature (138)..(139): n is a, c, g, or t
  misc_feature (141)..(143): n is a, c, g, or t
ccaggaactgcactttttaggggtggggacggtgaatgccaatgtggggacgtagatatcatagaggggatgtgtggctggnnnnnnnnnnnnnnnnnnnnnnnnnnnnnnagccaaggggctttattctannngnanngnnngtgaggaatggttggcattgctcttatctagattgacaaggagttcatttctctgtagactgtaactcctacaatacctgagattatttaaggtttatgctgcacctagtattccttagaggaagctgtcctta

SEQ ID NO: 4737 - DNA, 277 bp, Mus musculus; identical to SEQ ID NO: 4736
  misc_feature (82)..(111): n is a, c, g, or t
  misc_feature (132)..(134): n is a, c, g, or t
  misc_feature (136)..(136): n is a, c, g, or t
  misc_feature (138)..(139): n is a, c, g, or t
  misc_feature (141)..(143): n is a, c, g, or t

SEQ ID NO: 4738 - DNA, 551 bp, Mus musculus
  misc_feature (184)..(184): n is a, c, g, or t
taagaccaggactgctgcacctgccccccgaccgtccaatcacccccactctgcatctctgtccagtagtagtgccaagcccttagggacatcagagccacagagctgccgcccctctgcctggacacccctgcctcaggtcaatggacacttcacgtcccacttacaccaactgccagaggcnagcgaggccctacacagcccctccaaaaagaggaaaaagacccctaatggagatccccagagactgggcatcgacacgctcctcccacagtgcctcaggggagcacctgcagcagcacgcaggaagagaaagaagaggtgctcggagggtgagggtgccacagctcccaagcaggaaggccaatttcaggaccagtcttggagttccgggagccagaaggaagagggtacgcagccccaggtaaatggccatcaagtgagtcacattctggacagttaccatgtgagcagcaggaaaaggaggaagaggaaaagatcggaaggactcagccaggaagccaccccgtcgcaggacctaattcagcaca

SEQ ID NO: 4739 - DNA, 551 bp, Mus musculus; identical to SEQ ID NO: 4738
  misc_feature (184)..(184): n is a, c, g, or t

SEQ ID NO: 4740 - DNA, 264 bp, Mus musculus
  misc_feature (145)..(146): n is a, c, g, or t
  misc_feature (239)..(239): n is a, c, g, or t
tgtcctcggaatctgggaataaaatttaggggaaacagtctggtttctatgaccctataaagctgggtcttgtctaaagactgcagagggaaatcatgggaggccctgatcgtgattctgggcaccagcctggctcctcagggannacggagatcttctgagcccagcacttgccctttctgaactcttaatgactggagtctggcacatggagtataaaagtgcacacccatagatgntgcagcccatcatctcagtgtgtcc

SEQ ID NO: 4741 - DNA, 264 bp, Mus musculus; identical to SEQ ID NO: 4740
  misc_feature (145)..(146): n is a, c, g, or t
  misc_feature (239)..(239): n is a, c, g, or t

SEQ ID NO: 4742 - DNA, 604 bp, Mus musculus
  misc_feature (71)..(72): n is a, c, g, or t
  misc_feature (74)..(75): n is a, c, g, or t
  misc_feature (196)..(198): n is a, c, g, or t
  misc_feature (291)..(291): n is a, c, g, or t
  misc_feature (327)..(327): n is a, c, g, or t
  misc_feature (358)..(360): n is a, c, g, or t
  misc_feature (362)..(368): n is a, c, g, or t
  misc_feature (370)..(372): n is a, c, g, or t
  misc_feature (374)..(375): n is a, c, g, or t
  misc_feature (377)..(380): n is a, c, g, or t
  misc_feature (414)..(416): n is a, c, g, or t
  misc_feature (560)..(579): n is a, c, g, or t
cacaggaccccatggccctgggaagcagcgcgcggccggggctcgctgtggagatgtccgccgccccggcnncnncggggggcagcggggagacccctgcccgattgtcaatcgatgccatcgccgctcagctgttgcgcgatcaatacttgctgaccgccctggagctgcacaccgagctgttggagagcggccnnnagctaccacgactgcgcgattacttctccaatcctggcaacttcgagaggcagagtgggacccccccagggatgggggcgcccgggatccctngcgcctccatcgtcggaggcgctggaggtcgggaancgagtacgacgtcgggcggaggacagctcannngnnnnnnnannntnngnnnncttgactcattagactttgcaagatattcagatnnnggtaacagggaaacagatgaaagagtggcggtcctggagtttgaactacggaaagccaaggagaccattcaggccctccgagccaacctaacaaaggctgcagaacatgaagttcctttacaggaacgaaaaaattataaatcnnnnnnnnnnnnnnnnnnnncaatcaaacctcttgaaaagagagc

SEQ ID NO: 4743 - DNA, 604 bp, Mus musculus; identical to SEQ ID NO: 4742
  misc_feature (71)..(72): n is a, c, g, or t
  misc_feature (74)..(75): n is a, c, g, or t
  misc_feature (196)..(198): n is a, c, g, or t
  misc_feature (291)..(291): n is a, c, g, or t
  misc_feature (327)..(327): n is a, c, g, or t
  misc_feature (358)..(360): n is a, c, g, or t
  misc_feature (362)..(368): n is a, c, g, or t
  misc_feature (370)..(372): n is a, c, g, or t
  misc_feature (374)..(375): n is a, c, g, or t
  misc_feature (377)..(380): n is a, c, g, or t
  misc_feature (414)..(416): n is a, c, g, or t
  misc_feature (560)..(579): n is a, c, g, or t

SEQ ID NO: 4744 - DNA, 908 bp, Mus musculus
  misc_feature (265)..(283): n is a, c, g, or t
  misc_feature (649)..(667): n is a, c, g, or t
  misc_feature (769)..(792): n is a, c, g, or t
  misc_feature (839)..(862): n is a, c, g, or t
atcgcctgttgctggggctgcacagtgagctgttccgggagctgctgagcaaccagagtgaggttatgctgcgggagtcccgggactgtgctgctgtctttgacaagttcatcaggtatttgtactgtggtgagctgactgtactgctggcccaggctatcccgctgcacaggctggccaccaagtaccgagtagcatccttgcagcgaggcgtggccgactacatgcgcgcacacctggcgggaggcgtgggccccgctgtggnnnnnnnnnnnnnnnnnnntagcaccggggatgaggctctgcgcgagagctgcctgcagttcctggcttggaacctttctgccgtggcggggagcgcggagtggggagccgtgagccccgatcgcctgttgctggggctgcacagtgagctgttccgggagctgctgagcaaccagagtgaggttatgctgcgggagtcccgggactgtgctgctgtctttgacaagttcatcaggtatttgtactgtggtgagctgactgtactgctggcccaggctatcccgctgcacaggctggccaccaagtaccgagtagcatccttgcagcgaggcgtggccgactacatgcgcgcacacctggcgggaggcgtgggccccgctgtggnnnnnnnnnnnnnnnnnnntagcaccggggatgaggctctgcgcgagagctgcctgcagttcctggcttggaacctttctgccgtggcggggagcgcggagtggggagccgtgagccccgnnnnnnnnnnnnnnnnnnnnnnnngctcggacctggtgctgcaggatgagctggagctgttccacgcgctnnnnnnnnnnnnnnnnnnnnnnnngctcggacctggtgctgcaggatgagctggagctgttccacgcgct

SEQ ID NO: 4745 - DNA, 454 bp, Mus musculus
  misc_feature (265)..(283): n is a, c, g, or t
  misc_feature (385)..(408): n is a, c, g, or t
atcgcctgttgctggggctgcacagtgagctgttccgggagctgctgagcaaccagagtgaggttatgctgcgggagtcccgggactgtgctgctgtctttgacaagttcatcaggtatttgtactgtggtgagctgactgtactgctggcccaggctatcccgctgcacaggctggccaccaagtaccgagtagcatccttgcagcgaggcgtggccgactacatgcgcgcacacctggcgggaggcgtgggccccgctgtggnnnnnnnnnnnnnnnnnnntagcaccggggatgaggctctgcgcgagagctgcctgcagttcctggcttggaacctttctgccgtggcggggagcgcggagtggggagccgtgagccccgnnnnnnnnnnnnnnnnnnnnnnnngctcggacctggtgctgcaggatgagctggagctgttccacgcgct

SEQ ID NO: 4746 - DNA, 314 bp, Mus musculus
  misc_feature (66)..(66): n is a, c, g, or t
  misc_feature (199)..(199): n is a, c, g, or t
taactccgaggacttcgtagtaatttttacatttgtttatgctgagcacgccctctacttggtctntggtatagactttcccgccttccccagcaccagaagtgccgtcctttccacagctgggcttgctctggtcgctgctcccaggaggttttcggcaatgcgtgctacttccagcggtgctgccgtttttcataantatttccaataacgcgcgcgcggccggcagcgggtacagcttctcggccttctggaggaagcgctgggccttgtcgcggttgccggcgctcagggcctcgcgagcgatctgcacg

SEQ ID NO: 4747 - DNA, 314 bp, Mus musculus; identical to SEQ ID NO: 4746
  misc_feature (66)..(66): n is a, c, g, or t
  misc_feature (199)..(199): n is a, c, g, or t

SEQ ID NO: 4748 - DNA, 346 bp, Mus musculus
  misc_feature (27)..(27): n is a, c, g, or t
  misc_feature (39)..(39): n is a, c, g, or t
gccgcttgtttctgcatttcatgaatntgaagagctagntaaacagctgcagatccaaatagacaatcaaaatgatcccgaggagggacagtaaagttagtgtgatttaaccacctgccactcatcagccttatgttcccaaagagtcccaaatagtgctttggtgttcacagtctgtttctgtgtcgtaacttatatttttaatgctaatgttaacttgtcaatctcttgttgtgagctggatcgtttgtggatgccaaaaatgaatatcagaactgaaaacacacttgttgctatttgtcttaccgtccagattgtgatattttttagtgttgagctcccagtg

SEQ ID NO: 4749 - DNA, 346 bp, Mus musculus; identical to SEQ ID NO: 4748
  misc_feature (27)..(27): n is a, c, g, or t
  misc_feature (39)..(39): n is a, c, g, or t

SEQ ID NO: 4750 - DNA, 585 bp, Mus musculus
  misc_feature (137)..(186): n is a, c, g, or t
  misc_feature (203)..(203): n is a, c, g, or t
  misc_feature (444)..(444): n is a, c, g, or t
  misc_feature (457)..(457): n is a, c, g, or t
  misc_feature (478)..(478): n is a, c, g, or t
  misc_feature (494)..(539): n is a, c, g, or t
ttttgatgtcccacttgagacttcctgcaatacaactacctgcctgaatggatgactctcagagaaaaaagcaaagaacagttattgcttttccatctgccctactaataaatatttcacgatcctggatgctactnnnnnnnnnnnnnnnnnnnnnnnnnnnnnnnnnnnnnnnnnnnnnnnnnnttgccacaggaagcagntcctagaccatggcaggggtgcttctgttcagcctgggctcagtcctcctacagaccctgctgtgatggtccttccaacaaccctcacccttgtccttttatcctcatgtgtaagcactctttcctggagccctctagtgatgaattgtgagttatagaagctccaaggtgggggactttataacctcagctgggtagttccccactcctctctagggctttcgaatctgtacttcctggnaatgttattttgnttttgacttgctacttttggnccctggaggcaagggnnnnnnnnnnnnnnnnnnnnnnnnnnnnnnnnnnnnnnnnnnnnnnatccacatgtaagtatctggggtccttcagggttcccacatgtgct

SEQ ID NO: 4751 - DNA, 585 bp, Mus musculus; identical to SEQ ID NO: 4750
  misc_feature (137)..(186): n is a, c, g, or t
  misc_feature (203)..(203): n is a, c, g, or t
  misc_feature (444)..(444): n is a, c, g, or t
  misc_feature (457)..(457): n is a, c, g, or t
  misc_feature (478)..(478): n is a, c, g, or t
  misc_feature (494)..(539): n is a, c, g, or t

SEQ ID NO: 4752 - DNA, 575 bp, Mus musculus
  misc_feature (28)..(53): n is a, c, g, or t
  misc_feature (232)..(250): n is a, c, g, or t
  misc_feature (375)..(375): n is a, c, g, or t
  misc_feature (545)..(545): n is a, c, g, or t
tagacctgtctcttgcactcacagaagnnnnnnnnnnnnnnnnnnnnnnnnnngttaaatatacaaatccaattctctacctatgcacttggctcctggtgttggtgatccaacactgcaggcaatgctgtatacagaagaattcttggttcctgtccatgttctggattctctctctattatgtggcatattccagtttcagactctgatacgagcactcctgcaggatannnnnnnnnnnnnnnnnnnttcctgcctgttcttcgtctcctatggtttccagattgtcattttgatcctttcagccttttcagaatcaagcgactcaacacacgccccatcagctacagcttcatttctgagtagcgttacgnttagttggtatgacagcactgttctgaaaggttacaagcatccattgacaatagaagatgtgtgggatattgaagaaaatcttaaagccaagtcactcaccagcaagtttaagacgatcatgacaaaggacctgcagaaagccaggcaggctcttcagaggcggctgaanaagtcccagcagagccctgagggcacgtca

SEQ ID NO: 4753 - DNA, 575 bp, Mus musculus; identical to SEQ ID NO: 4752
  misc_feature (28)..(53): n is a, c, g, or t
  misc_feature (232)..(250): n is a, c, g, or t
  misc_feature (375)..(375): n is a, c, g, or t
  misc_feature (545)..(545): n is a, c, g, or t

SEQ ID NO: 4754 - DNA, 328 bp, Mus musculus
  misc_feature (68)..(68): n is a, c, g, or t
  misc_feature (234)..(234): n is a, c, g, or t
  misc_feature (277)..(291): n is a, c, g, or t
cggtttctttgacatcattgttctgtccccggtgccccccacccacttcatctccagcacccagctgncctccctcatccctgtcccttccaccttcacttctgtgtcctaaaggctttgtcagaaagtgggaagtcggtactgccgagagtcagaaaagacctctgatgtcttggtgccctgccctgccctggcctgccctgccctgtcaccagctcttatgatggttgtccntacccagactgcagggtctcgtttggctcatgcactctcctgnnnnnnnnnnnnnnnaggtgtgtatatgttttgtacctctgctgacaactgt

SEQ ID NO: 4755 - DNA, 328 bp, Mus musculus; identical to SEQ ID NO: 4754
  misc_feature (68)..(68): n is a, c, g, or t
  misc_feature (234)..(234): n is a, c, g, or t
  misc_feature (277)..(291): n is a, c, g, or t

SEQ ID NO: 4756 - DNA, 214 bp, Mus musculus
  misc_feature (167)..(167): n is a, c, g, or t
  misc_feature (181)..(181): n is a, c, g, or t
gttcttcgaggatgggtgcatcctagccaggacttagaagcctttccccacccaggaagacctcaccatttcttcctcctgttccctctcttgtacgtgtgagctgctaatggggtgcttcattcaccatggggctgtgtgcatgctcctcagagcctgtcacgctntggcctacggctcntacacaggtgccctgagcgcagatatcttctca

SEQ ID NO: 4757 - DNA, 214 bp, Mus musculus; identical to SEQ ID NO: 4756
  misc_feature (167)..(167): n is a, c, g, or t
  misc_feature (181)..(181): n is a, c, g, or t

SEQ ID NO: 4758 - DNA, 124 bp, Mus musculus
ggtgccaccatatgcctgccttgctctgagcatgggttgtactctcctggaaggttacacttgaacaggaaactggccggcctctgggagggacgttcagtgtccgcagtacagcttaccttct

SEQ ID NO: 4759 - DNA, 124 bp, Mus musculus; identical to SEQ ID NO: 4758

SEQ ID NO: 4760 - DNA, 459 bp, Mus musculus
  misc_feature (100)..(126): n is a, c, g, or t
  misc_feature (295)..(295): n is a, c, g, or t
  misc_feature (385)..(432): n is a, c, g, or t
ggacctggtgacctcctttgcctctaacagcagcactgtttctgagggttggggagatagaatatggaaggacagggctctgtcccttacagacaggacnnnnnnnnnnnnnnnnnnnnnnnnnnnctgtcctcatgtgtgcagacattagccccacttacatttctaaataatttttatattaacatgactgtcaacattgccttcagaagtctgcttgccctacaagtatttttttttcctgtgaactaagatcctggaaagctggaactcaaaagattcttactgttaaaanttccagaataggagggagggagagcacaccctgcccttccagccccaggatgggcaaaactcagaacagttcaagcagccattcctgttnnnnnnnnnnnnnnnnnnnnnnnnnnnnnnnnnnnnnnnnnnnnnnnnctcctgtttctcgcaccaaatgttgtg

SEQ ID NO: 4761 - DNA, 459 bp, Mus musculus; identical to SEQ ID NO: 4760
  misc_feature (100)..(126): n is a, c, g, or t
  misc_feature (295)..(295): n is a, c, g, or t
  misc_feature (385)..(432): n is a, c, g, or t

SEQ ID NO: 4762 - DNA, 258 bp, Mus musculus
  misc_feature (189)..(189): n is a, c, g, or t
  misc_feature (209)..(209): n is a, c, g, or t
cccttttgtaacataggtggatgtggcaggctgggtttgactagagagttggatctatcttagtcctggctcatttcactgtgctctgcggatacacacaagaatcctgaattctgtttcctaggcaaatactgcaactcagggctaaagtcacccagtgaatccttagagcctgaagtaactttgtcncaggcctacaatgcgtatcnactgcagactcgcctccgtgcagccaagttcatggctggtacatagccg

SEQ ID NO: 4763 - DNA, 258 bp, Mus musculus; identical to SEQ ID NO: 4762
  misc_feature (189)..(189): n is a, c, g, or t
  misc_feature (209)..(209): n is a, c, g, or t

SEQ ID NO: 4764 - DNA, 284 bp, Mus musculus
  misc_feature (179)..(197): n is a, c, g, or t
gccctcgagccgtgttcctgctattggaagagcgcaggccagctgagtcggcccagctgctcagcctgaattctttgcttccggaatccgggattgttgctgatatcgagttagaaaacatcctcgatcctgacagcttctacgagctcaaaagccaacccctatccctccgctccagnnnnnnnnnnnnnnnnnnngccacaccgaccaccccagctacactctctgcgtcgtcttctgcagggggctcccggacccctgccatgtcatcttcttcatcacgg

SEQ ID NO: 4765 - DNA, 414 bp, Mus musculus
  misc_feature (229)..(229): n is a, c, g, or t
tgtgggccgccaggatctcccgcttcgcccacaccctgccgccgtggaaagccatgggccccctcccgcccccataactaagcagcacaataaccgacttagcgaattcaggtagaaggaacgtttaggtagcacctattttgtactgattctacaagtagggcccgaggtgcggggggccctcgggtgggggctgtggctgccggcccgccccgcccccacccccgcntgcgccccgccaccttgtacatactcctggcccgcaacaggccgggatttttactcgggccgtgtccctcttccgcccccgtttggggccgggccggccggacagacggacggacggacagacctccttcctaagcacaatagcaccagctcctcggagcgccgcacctccacgaggagaataaa

SEQ ID NO: 4766 - DNA, 414 bp, Mus musculus; identical to SEQ ID NO: 4765
  misc_feature (229)..(229): n is a, c, g, or t

SEQ ID NO: 4767 - DNA, 401 bp, Mus musculus
  misc_feature (129)..(143): n is a, c, g, or t
  misc_feature (169)..(170): n is a, c, g, or t
  misc_feature (175)..(176): n is a, c, g, or t
  misc_feature (179)..(179): n is a, c, g, or t
  misc_feature (182)..(183): n is a, c, g, or t
  misc_feature (193)..(237): n is a, c, g, or t
  misc_feature (246)..(247): n is a, c, g, or t
cctttggacatagacagtaaacagcaggagacactggacatagacagtaaacagcaggaggcacaaaacatgggattggtactgtgtcatttgacactctgagccttaataagaaattaagttaaggannnnnnnnnnnnnnnggacccatgaaatctgggcctttggnntagcnnaanggnntctctctacnnnnnnnnnnnnnnnnnnnnnnnnnnnnnnnnnnnnnnnnnnnnnaaagcctcnntcccaggcaccatgtcagtattgtacaacctatcatcccaccctgctgggggctttagaacttctcacagaccatttttaggaaggcatatggcagcttcctttctaccttggtttctttggggcatgatgctttgatgttgctttagaggcac

SEQ ID NO: 4768 - DNA, 401 bp, Mus musculus; identical to SEQ ID NO: 4767
  misc_feature (129)..(143): n is a, c, g, or t
  misc_feature (169)..(170): n is a, c, g, or t
  misc_feature (175)..(176): n is a, c, g, or t
  misc_feature (179)..(179): n is a, c, g, or t
  misc_feature (182)..(183): n is a, c, g, or t
  misc_feature (193)..(237): n is a, c, g, or t
  misc_feature (246)..(247): n is a, c, g, or t

SEQ ID NO: 4769 - DNA, 121 bp, Mus musculus
tctggtgcaccaggtgacaaagaggcacaggtgttccctcctgctaacgccctaccagccaggagtgaggcagccgaggtgcagccagtgatcgggatcagtcagcttgtgaggatgaact

SEQ ID NO: 4770 - DNA, 121 bp, Mus musculus; identical to SEQ ID NO: 4769

SEQ ID NO: 4771 - DNA, 69 bp, Mus musculus
cccgcgccgggtctccgctgcctcaactggttggccgcgcaaggcagccgcgagtcgctcaccgagccc

SEQ ID NO: 4772 - DNA, 69 bp, Mus musculus; identical to SEQ ID NO: 4771

SEQ ID NO: 4773 - DNA, 198 bp, Mus musculus
ctaacagtcttcaggaaggttttatgattatcttcattttacaggtgggtaactgagacagaggtaaagtgacttttttagggtcacatcacgatacccttttctggagctcttctctgggctgctcagaaaccctgaacaaacacatttcagaagctcacaacaagaaaaaaaaactccctgctcagtaatagcctg

SEQ ID NO: 4774 - DNA, 198 bp, Mus musculus; identical to SEQ ID NO: 4773

SEQ ID NO: 4775 - DNA, 308 bp, Mus musculus
tggaccttgtgcaccatgcaaacagacagctcagggcggtctccaaggaagctagtggcccaaggagtcccactgtgtttggggccatcatttcctacgttgagcagtttttcgagactgttgggatttctctggcaaatcgacagtgtgtttcaggagacagcagcacagtaacgttgcgctgtgtggtagatgaactcgtgcgcttcaggctgaaggtccgccagtatgcactggacacacccggggctgctggggaggctcggaaacggcagctccaggaaaggcagcccttgctggaggcatgt

SEQ ID NO: 4776 - DNA, 308 bp, Mus musculus; identical to SEQ ID NO: 4775

SEQ ID NO: 4777 - DNA, 556 bp, Mus musculus
  misc_feature (26)..(26): n is a, c, g, or t
  misc_feature (33)..(33): n is a, c, g, or t
  misc_feature (49)..(161): n is a, c, g, or t
  misc_feature (163)..(198): n is a, c, g, or t
  misc_feature (200)..(202): n is a, c, g, or t
  misc_feature (204)..(206): n is a, c, g, or t
  misc_feature (208)..(208): n is a, c, g, or t
  misc_feature (210)..(210): n is a, c, g, or t
  misc_feature (214)..(216): n is a, c, g, or t
  misc_feature (219)..(219): n is a, c, g, or t
  misc_feature (231)..(232): n is a, c, g, or t
  misc_feature (236)..(236): n is a, c, g, or t
  misc_feature (244)..(244): n is a, c, g, or t
  misc_feature (253)..(255): n is a, c, g, or t
  misc_feature (257)..(258): n is a, c, g, or t
  misc_feature (261)..(261): n is a, c, g, or t
  misc_feature (266)..(267): n is a, c, g, or t
  misc_feature (271)..(272): n is a, c, g, or t
  misc_feature (282)..(284): n is a, c, g, or t
  misc_feature (287)..(287): n is a, c, g, or t
  misc_feature (289)..(289): n is a, c, g, or t
  misc_feature (297)..(297): n is a, c, g, or t
  misc_feature (299)..(299): n is a, c, g, or t
  misc_feature (303)..(303): n is a, c, g, or t
  misc_feature (305)..(305): n is a, c, g, or t
  misc_feature (308)..(308): n is a, c, g, or t
  misc_feature (314)..(314): n is a, c, g, or t
  misc_feature (318)..(318): n is a, c, g, or t
  misc_feature (441)..(441): n is a, c, g, or t
  misc_feature (514)..(519): n is a, c, g, or t
cagaagcgtgggggcacgctgctaantgtgtgntcctcaggctggctcnnnnnnnnnnnnnnnnnnnnnnnnnnnnnnnnnnnnnnnnnnnnnnnnnnnnnnnnnnnnnnnnnnnnnnnnnnnnnnnnnnnnnnnnnnnnnnnnnnnnnnnnnnnnnnnnnannnnnnnnnnnnnnnnnnnnnnnnnnnnnnnnnnnngnnncnnnananaaannnagnttccaagagcannggcntcattttnttcagccannngnnggnagaannggannagggccaagnnntcntnttcacctngngacntntantttccngtgngatatcccaaacagggtgagagttcctcccgctttctgagcaggcacggtaggggaaagtaactgaaatcacaaaagaagagaagaaagatgggaaagagaaagctttcagactttgaaagantctttttgagtgatattggatggtccttaaaatgtattcattacctgacaataaagtttaactgaacatcccnnnnnntttcaaaactatttacccgttcctccgtcaatcttct

SEQ ID NO: 4778 - DNA, 556 bp, Mus musculus; identical to SEQ ID NO: 4777
  misc_feature (26)..(26): n is a, c, g, or t
  misc_feature (33)..(33): n is a, c, g, or t
  misc_feature (49)..(161): n is a, c, g, or t
  misc_feature (163)..(198): n is a, c, g, or t
  misc_feature (200)..(202): n is a, c, g, or t
  misc_feature (204)..(206): n is a, c, g, or t
  misc_feature (208)..(208): n is a, c, g, or t
  misc_feature (210)..(210): n is a, c, g, or t
  misc_feature (214)..(216): n is a, c, g, or t
  misc_feature (219)..(219): n is a, c, g, or t
  misc_feature (231)..(232): n is a, c, g, or t
  misc_feature (236)..(236): n is a, c, g, or t
  misc_feature (244)..(244): n is a, c, g, or t
  misc_feature (253)..(255): n is a, c, g, or t
  misc_feature (257)..(258): n is a, c, g, or t
  misc_feature (261)..(261): n is a, c, g, or t
  misc_feature (266)..(267): n is a, c, g, or t
  misc_feature (271)..(272): n is a, c, g, or t
  misc_feature (282)..(284): n is a, c, g, or t
  misc_feature (287)..(287): n is a, c, g, or t
  misc_feature (289)..(289): n is a, c, g, or t
  misc_feature (297)..(297): n is a, c, g, or t
  misc_feature (299)..(299): n is a, c, g, or t
  misc_feature (303)..(303): n is a, c, g, or t
  misc_feature (305)..(305): n is a, c, g, or t
  misc_feature (308)..(308): n is a, c, g, or t
  misc_feature (314)..(314): n is a, c, g, or t
  misc_feature (318)..(318): n is a, c, g, or t
  misc_feature (441)..(441): n is a, c, g, or t
  misc_feature (514)..(519): n is a, c, g, or t

SEQ ID NO: 4779 - DNA, 593 bp, Mus musculus
  misc_feature (43)..(43): n is a, c, g, or t
  misc_feature (63)..(63): n is a, c, g, or t
  misc_feature (79)..(79): n is a, c, g, or t
  misc_feature (127)..(127): n is a, c, g, or t
  misc_feature (140)..(140): n is a, c, g, or t
  misc_feature (142)..(142): n is a, c, g, or t
  misc_feature (196)..(196): n is a, c, g, or t
  misc_feature (222)..(222): n is a, c, g, or t
  misc_feature (276)..(277): n is a, c, g, or t
  misc_feature (280)..(280): n is a, c, g, or t
  misc_feature (306)..(307): n is a, c, g, or t
  misc_feature (311)..(318): n is a, c, g, or t
  misc_feature (320)..(334): n is a, c, g, or t
  misc_feature (363)..(363): n is a, c, g, or t
  misc_feature (366)..(366): n is a, c, g, or t
  misc_feature (372)..(372): n is a, c, g, or t
  misc_feature (385)..(385): n is a, c, g, or t
  misc_feature (389)..(389): n is a, c, g, or t
  misc_feature (402)..(402): n is a, c, g, or t
  misc_feature (407)..(407): n is a, c, g, or t
  misc_feature (429)..(429): n is a, c, g, or t
  misc_feature (445)..(445): n is a, c, g, or t
  misc_feature (466)..(466): n is a, c, g, or t
  misc_feature (484)..(484): n is a, c, g, or t
  misc_feature (517)..(536): n is a, c, g, or t
  misc_feature (545)..(545): n is a, c, g, or t
  misc_feature (547)..(547): n is a, c, g, or t
  misc_feature (549)..(549): n is a, c, g, or t
atccaaggagctgtgagcattactgccctccacacgtttgctnccagttccaaaagcagccantgttggtgaagaccantcagggcctgacaggcccagaggcagcctgctcactgcaggactgagntccaccagggagntntgctgggcaggagtcgggagagagcccagcgagaccccagcagcctcccgtttntcgtctcaccccacagaggtcccatntgcacctgtctaacatcataatccacctaagattttggaacaaagagccatggnnttnaaaaaaaaaaaaagaaaggaaggaannaaannnnnnnnannnnnnnnnnnnnnntcagtacaattgcgggggcaaagtgtggnttncaggancccagggaaaatntcangtccaggccctgngtttnttacagcccggctgttgtattntggtgcctgtttttcntcgtgtaagtggagctggttntactcacattgagagggntgaaggaaatggcaggtggcttgctgcccaagnnnnnnnnnnnnnnnnnnnnttgttggtntntnttgtagatcacacacagtgtcatgcctcacactgtaacagcaag

SEQ ID NO: 4780 - DNA, 593 bp, Mus musculus; identical to SEQ ID NO: 4779
  misc_feature (43)..(43): n is a, c, g, or t
  misc_feature (63)..(63): n is a, c, g, or t
  misc_feature (79)..(79): n is a, c, g, or t
  misc_feature (127)..(127): n is a, c, g, or t
  misc_feature (140)..(140): n is a, c, g, or t
  misc_feature (142)..(142): n is a, c, g, or t
  misc_feature (196)..(196): n is a, c, g, or t
  misc_feature (222)..(222): n is a, c, g, or t
  misc_feature (276)..(277): n is a, c, g, or t
  misc_feature (280)..(280): n is a, c, g, or t
  misc_feature (306)..(307): n is a, c, g, or t
  misc_feature (311)..(318): n is a, c, g, or t
  misc_feature (320)..(334): n is a, c, g, or t
  misc_feature (363)..(363): n is a, c, g, or t
  misc_feature (366)..(366): n is a, c, g, or t
  misc_feature (372)..(372): n is a, c, g, or t
  misc_feature (385)..(385): n is a, c, g, or t
  misc_feature (389)..(389): n is a, c, g, or t
  misc_feature (402)..(402): n is a, c, g, or t
  misc_feature (407)..(407): n is a, c, g, or t
  misc_feature (429)..(429): n is a, c, g, or t
  misc_feature (445)..(445): n is a, c, g, or t
  misc_feature (466)..(466): n is a, c, g, or t
  misc_feature (484)..(484): n is a, c, g, or t
  misc_feature (517)..(536): n is a, c, g, or t
  misc_feature (545)..(545): n is a, c, g, or t
  misc_feature (547)..(547): n is a, c, g, or t
  misc_feature (549)..(549): n is a, c, g, or t

SEQ ID NO: 4781 - DNA, 509 bp, Mus musculus
  misc_feature (77)..(77): n is a, c, g, or t
  misc_feature (364)..(364): n is a, c, g, or t
  misc_feature (391)..(391): n is a, c, g, or t
  misc_feature (418)..(418): n is a, c, g, or t
  misc_feature (431)..(431): n is a, c, g, or t
  misc_feature (439)..(439): n is a, c, g, or t
  misc_feature (441)..(441): n is a, c, g, or t
  misc_feature (444)..(444): n is a, c, g, or t
  misc_feature (454)..(468): n is a, c, g, or t
gcaatatacttttacgattttcaggccccatgaccaaatgtttagagacattaactctcgccagttattcacgtttnaatgggtaatttcactttgggaaacatgtttgtaaggaacagaggtatctatgtatgttaaattcatctatggctgacatgatcttataagagaatgttcatagtcctctttgtacatgaaatcgtggctagaatgttaaatggataatgtataaacaagaagtatgttatactgctcactatacctttagctgtgttttgaaatatagttttgcaaaatctttctgtaggaaaaggagcactctctacatgaaggtcacatgttttctatttcagagttcagaagntctgtgttaaaggaggaacaattcccnaaacagaaaaacaagaaaaaaagccantcagattcctggntccccctntnttntttcctcagnnnnnnnnnnnnnnntgcagaggctgaacgttggcgttcacggaacaggaaatgaa

SEQ ID NO: 4782 - DNA, 509 bp, Mus musculus; identical to SEQ ID NO: 4781
  misc_feature (77)..(77): n is a, c, g, or t
  misc_feature (364)..(364): n is a, c, g, or t
  misc_feature (391)..(391): n is a, c, g, or t
  misc_feature (418)..(418): n is a, c, g, or t
  misc_feature (431)..(431): n is a, c, g, or t
  misc_feature (439)..(439): n is a, c, g, or t
  misc_feature (441)..(441): n is a, c, g, or t
  misc_feature (444)..(444): n is a, c, g, or t
  misc_feature (454)..(468): n is a, c, g, or t

SEQ ID NO: 4783 - DNA, 289 bp, Mus musculus
  misc_feature (176)..(210): n is a, c, g, or t
tactagacatgaacaagggtctcagcctgcagcacataggccggccccacagcggcattgatgactgcaagaacattgccaacatcatgaagacattggcataccgaggcttcatcttcaagcagacatcaaagcccttctgattggcagaggacgggatggggcaggacagggtnnnnnnnnnnnnnnnnnnnnnnnnnnnnnnnnnnncaccagagggaaaagggagagtggcacagctctgcgcccagagtgtcccccagctgccctacaggcttgtgccctgtgt

SEQ ID NO: 4784 - DNA, 289 bp, Mus musculus; identical to SEQ ID NO: 4783
  misc_feature (176)..(210): n is a, c, g, or t

SEQ ID NO: 4785 - DNA, 376 bp, Mus musculus
  misc_feature (42)..(42): n is a, c, g, or t
  misc_feature (96)..(96): n is a, c, g, or t
ctaatgaagtcttagcactttgggtattttaattgttcttangggtagcagtagatgattcagtgttgttgggaagttgtttcccagatgtactgnagtggggtttttgttctggtcttttgttttttgttttttgttttatttggtgagtggtccagagctctgagctacttttctagacatttgaaacttccttccaggtgctttgtgctgattgtgtgtcaaaattttatctgccactgtaggcaacagataagtaagtagttaatttgtctccagcaccacacaaggcattttctatttattgtgcatattcactttcaataatattctgaactgatttttttttaaaaaccacaaatcagtagaaaggctg

SEQ ID NO: 4786 - DNA, 376 bp, Mus musculus; identical to SEQ ID NO: 4785
  misc_feature (42)..(42): n is a, c, g, or t
  misc_feature (96)..(96): n is a, c, g, or t

SEQ ID NO: 4787 - DNA, 231 bp, Mus musculus
  misc_feature (97)..(97): n is a, c, g, or t
acatacagctagtggcccaaagtatgctgtccctggagggcaacgctcctgcagccaggccctggcaagcacagacagctggtgctgtgtggaatgnctcagtgcatcttatctctaacttccgtggtgactcccccacccacatgccgtgttcactgtcagcactgttctgaggctgctcttgaaaatgatgtctgtcttacgtactggatactccgaggcatgctggcg

SEQ ID NO: 4788 - DNA, 231 bp, Mus musculus; identical to SEQ ID NO: 4787
  misc_feature (97)..(97): n is a, c, g, or t

SEQ ID NO: 4789 - DNA, 100 bp, Mus musculus
cacaacctagtccacaaaggggtcaaggtggtgatggatatcccctatgagctgtggaacgagacctcagcagaggtggctgacctcaagaagcagtgtg

SEQ ID NO: 4790 - DNA, 100 bp, Mus musculus; identical to SEQ ID NO: 4789

SEQ ID NO: 4791 - DNA, 199 bp, Mus musculus
  misc_feature (105)..(105): n is a, c, g, or t
  misc_feature (164)..(164): n is a, c, g, or t
cagctctgattgtgactaagaagagacttacctatctatttaataaaacattaattatgcaagttgcctacttcctgctacttggactttggttctcacataccngaaggagcttccattccttcagacttgctgcagaatcattttgtattaaatagtctgtntcctccaacccccagaacctcgagcattggcgact

SEQ ID NO: 4792 - DNA, 199 bp, Mus musculus; identical to SEQ ID NO: 4791
  misc_feature (105)..(105): n is a, c, g, or t
  misc_feature (164)..(164): n is a, c, g, or t

SEQ ID NO: 4793 - DNA, 468 bp, Mus musculus
  misc_feature (118)..(118): n is a, c, g, or t
  misc_feature (135)..(135): n is a, c, g, or t
  misc_feature (158)..(158): n is a, c, g, or t
  misc_feature (265)..(265): n is a, c, g, or t
  misc_feature (403)..(432): n is a, c, g, or t
agaagcctaaacatagtcgatcgcgctccctggagaaatctcaaaggtctggtaagaaggcaagccgcaaacacaagtctaagtcccgatcaaggtagtatactttttaaagtatttngtctgattttttttttnagttttttgaatttattcaaagnttgaaagtgtcctttctctctctctctctctcttttataaactcagtttggtatttattaaatatttttaaataatgttagaaatcctgtataaaagtatttatttntattgcagattttaagtataaatacatttttatttttaaattttgtcttttcccttttttttttctttcagatcaacaacccctccccgtcgtaagcgctgaggaatgatgtggcaagaatgccatgatgctgttttnnnnnnnnnnnnnnnnnnnnnnnnnnnnnncattatagaggcacattgtggctgtgtaggtgaaac

SEQ ID NO: 4794 - DNA, 468 bp, Mus musculus; identical to SEQ ID NO: 4793
  misc_feature (118)..(118): n is a, c, g, or t
  misc_feature (135)..(135): n is a, c, g, or t
  misc_feature (158)..(158): n is a, c, g, or t
  misc_feature (265)..(265): n is a, c, g, or t
  misc_feature (403)..(432): n is a, c, g, or t

SEQ ID NO: 4795 - DNA, 549 bp, Mus musculus
  misc_feature (28)..(28): n is a, c, g, or t
  misc_feature (33)..(34): n is a, c, g, or t
  misc_feature (36)..(36): n is a, c, g, or t
  misc_feature (45)..(45): n is a, c, g, or t
  misc_feature (50)..(50): n is a, c, g, or t
  misc_feature (232)..(232): n is a, c, g, or t
  misc_feature (234)..(236): n is a, c, g, or t
  misc_feature (244)..(269): n is a, c, g, or t
  misc_feature (271)..(279): n is a, c, g, or t
  misc_feature (409)..(409): n is a, c, g, or t
  misc_feature (434)..(448): n is a, c, g, or t
  misc_feature (480)..(480): n is a, c, g, or t
caggcagtcttgtgccggcacgcacagntgcanncncgcatgcangttcncagcgcaggcacccccagctcgcctggatctgactccaagtggcttgggtgcctggtgggcagcaccttggagaccaagcagccatcccagcgaagacttacctgcctggccccaccacctggagtgtttcagagaatcacttggtggcagtcacgtggctgactcctgtcttgggccatancnnngatccctnnnnnnnnnnnnnnnnnnnnnnnnnngnnnnnnnnngtgcagctgtgtcttatgtatttatatgtatgtcgctcttcaaaagcaacctagtttatggggcagctggactttgcatgttagagtgagccccaagccccttggcccaccaccctgttgtctgaagggntctgtctcactccacctccttatcnnnnnnnnnnnnnnnttcctgcaaaggattatgggaaactccaggantcttctacccagctcctgcctgcaaaggttccctgcatgcctcttcccctgagcccaggggtacctggt

SEQ ID NO: 4796 - DNA, 549 bp, Mus musculus; identical to SEQ ID NO: 4795
  misc_feature (28)..(28): n is a, c, g, or t
  misc_feature (33)..(34): n is a, c, g, or t
  misc_feature (36)..(36): n is a, c, g, or t
  misc_feature (45)..(45): n is a, c, g, or t
  misc_feature (50)..(50): n is a, c, g, or t
  misc_feature (232)..(232): n is a, c, g, or t
  misc_feature (234)..(236): n is a, c, g, or t
  misc_feature (244)..(269): n is a, c, g, or t
  misc_feature (271)..(279): n is a, c, g, or t
  misc_feature (409)..(409): n is a, c, g, or t
  misc_feature (434)..(448): n is a, c, g, or t
  misc_feature (480)..(480): n is a, c, g, or t

SEQ ID NO: 4797 - DNA, 587 bp, Mus musculus
  misc_feature (31)..(31): n is a, c, g, or t
  misc_feature (59)..(59): n is a, c, g, or t
  misc_feature (251)..(251): n is a, c, g, or t
  misc_feature (254)..(255): n is a, c, g, or t
  misc_feature (258)..(268): n is a, c, g, or t
aatgcagcagtggaaaactgactaacaaatngaatgtaaagttgggaatgtttggttcngtgtatgcagacacatgagctgtggggtaacaatcaaaacgtaatctttcatagatagccattacatttctttaaatttttcaatgccgatgtgtattctataagagaatagcttcctaattaagtcggtttagaagaaggtgctggtgtcacacatttttttataaaaaataaattttacatagtgaaatncannaannnnnnnnnnnagttattacaaagagcctcctttccccaccttactcacactgattcccacctaacaatcagcagatgggagtgtgggttccttatgtcacaggctgtgcccagcggtcactcacaacataggtctgttgagtcttttttaaatgcactaggagccaactctgtccatctgtgatgggattagaaagcccggtgtttttctgtgatattagatgtcctccgagcacagcccacttggatttgtttgtttggttttgccttgagactgggtctcactatacagagcagcctgcctccccactgctgggattaagctgagaa

SEQ ID NO: 4798 - DNA, 587 bp, Mus musculus; identical to SEQ ID NO: 4797
  misc_feature (31)..(31): n is a, c, g, or t
  misc_feature (59)..(59): n is a, c, g, or t
  misc_feature (251)..(251): n is a, c, g, or t
  misc_feature (254)..(255): n is a, c, g, or t
  misc_feature (258)..(268): n is a, c, g, or t

SEQ ID NO: 4799 - DNA, 203 bp, Mus musculus
  misc_feature (96)..(96): n is a, c, g, or t
gctgtcctgcgtagcctcgtgtttgagcctgatgaagcactgcgtgctcatgtaccaggcactgccgtccttccacgccatcttcaggccccatcnagccctcctgtcgaagcatcttgcagattgtagcctcccccaagaacttcaggagctggctcaaagcatactgtcagcaatggaaggccagaagcagcactgccgcc

SEQ ID NO: 4800 - DNA, 203 bp, Mus musculus; identical to SEQ ID NO: 4799
  misc_feature (96)..(96): n is a, c, g, or t

SEQ ID NO: 4801 - DNA, 346 bp, Mus musculus
ctaaacatgttatgttcagtcagatttcactaaagtgagcgactgggttttaagtcaaactgcactgaaacttttaacctttacttagattaaacgtttgttcttttctgtatgtataaataatacaaggtgattatttcaagagaaacctgaaaaagtacttgaataagggctattgtgaaatttaaaaagaaaaaaaatgtgcacatatacacacacatacatgcacatacatgtattcttcataatggagggcaatgtttttcattatataattattctatttttgtaaattatatactactttaattgagaaatgtcctctactaatcaatgctgtgaaatg

SEQ ID NO: 4802 - DNA, 346 bp, Mus musculus; identical to SEQ ID NO: 4801

SEQ ID NO: 4803 - DNA, 230 bp, Mus musculus
  misc_feature (32)..(32): n is a, c, g, or t
  misc_feature (54)..(54): n is a, c, g, or t
  misc_feature (104)..(104): n is a, c, g, or t
  misc_feature (113)..(113): n is a, c, g, or t
  misc_feature (117)..(117): n is a, c, g, or t
  misc_feature (125)..(125): n is a, c, g, or t
  misc_feature (129)..(129): n is a, c, g, or t
  misc_feature (131)..(131): n is a, c, g, or t
  misc_feature (160)..(160): n is a, c, g, or t
  misc_feature (193)..(193): n is a, c, g, or t
attttgagcccaatgttatgtattctacattntctttgggtatatgaacatacntcttcctatacaaaagtttcctttggccatgtctttaagtaaaatgtttntactccatnttanacaaattntgantngtcttcacacacagagacgcatccatgtntctggggttgataacggaaagggaaacaatggntgcctggagaaggcatgtttatcatcctggaaagaag

SEQ ID NO: 4804 - DNA, 230 bp, Mus musculus; identical to SEQ ID NO: 4803
  misc_feature (32)..(32): n is a, c, g, or t
  misc_feature (54)..(54): n is a, c, g, or t
  misc_feature (104)..(104): n is a, c, g, or t
  misc_feature (113)..(113): n is a, c, g, or t
  misc_feature (117)..(117): n is a, c, g, or t
  misc_feature (125)..(125): n is a, c, g, or t
  misc_feature (129)..(129): n is a, c, g, or t
  misc_feature (131)..(131): n is a, c, g, or t
  misc_feature (160)..(160): n is a, c, g, or t
  misc_feature (193)..(193): n is a, c, g, or t

SEQ ID NO: 4805 - DNA, 429 bp, Mus musculus
  misc_feature (68)..(68): n is a, c, g, or t
  misc_feature (99)..(115): n is a, c, g, or t
  misc_feature (193)..(219): n is a, c, g, or t
  misc_feature (270)..(284): n is a, c, g, or t
  misc_feature (291)..(292): n is a, c, g, or t
  misc_feature (294)..(295): n is a, c, g, or t
  misc_feature (297)..(297): n is a, c, g, or t
  misc_feature (303)..(305): n is a, c, g, or t
  misc_feature (310)..(310): n is a, c, g, or t
  misc_feature (313)..(314): n is a, c, g, or t
  misc_feature (317)..(317): n is a, c, g, or t
  misc_feature (325)..(325): n is a, c, g, or t
  misc_feature (341)..(341): n is a, c, g, or t
  misc_feature (353)..(353): n is a, c, g, or t
  misc_feature (366)..(367): n is a, c, g, or t
  misc_feature (369)..(371): n is a, c, g, or t
  misc_feature (374)..(378): n is a, c, g, or t
  misc_feature (380)..(380): n is a, c, g, or t
  misc_feature (382)..(382): n is a, c, g, or t
  misc_feature (402)..(402): n is a, c, g, or t
  misc_feature (404)..(404): n is a, c, g, or t
tctgttgtcatcagcccacctgagttctatcacacaccaggttctgttgagaatcttcggcggcaggnctgtctggttgctgttgagaatgcatggcgnnnnnnnnnnnnnnnnngtgacctcgttggccaaactctgggaaaacctttactaatcaaagaagaagaaacaaaagactgggaaggccaaacgnnnnnnnnnnnnnnnnnnnnnnnnnnnggcacattaactgtacaacagaaaatcaaaagtgcaaccatccatgcagcnnnnnnnnnnnnnnntactttnnanntnaaaggnnnagagnagnnaanaaagcatntttaaaattctaactnaaacatgatgtntctgtacttttanntnnnttnnnnnananttttacagtgcttctttctntntcggacattcaacatattgtatggc

SEQ ID NO: 4806 - DNA, 429 bp, Mus musculus; identical to SEQ ID NO: 4805
  misc_feature (68)..(68): n is a, c, g, or t
  misc_feature (99)..(115): n is a, c, g, or t
  misc_feature (193)..(219): n is a, c, g, or t
  misc_feature (270)..(284): n is a, c, g, or t
  misc_feature (291)..(292): n is a, c, g, or t
  misc_feature (294)..(295): n is a, c, g, or t
  misc_feature (297)..(297): n is a, c, g, or t
  misc_feature (303)..(305): n is a, c, g, or t
  misc_feature (310)..(310): n is a, c, g, or t
  misc_feature (313)..(314): n is a, c, g, or t
  misc_feature (317)..(317): n is a, c, g, or t
  misc_feature (325)..(325): n is a, c, g, or t
  misc_feature (341)..(341): n is a, c, g, or t
  misc_feature (353)..(353): n is a, c, g, or t
  misc_feature (366)..(367): n is a, c, g, or t
  misc_feature (369)..(371): n is a, c, g, or t
  misc_feature (374)..(378): n is a, c, g, or t
  misc_feature (380)..(380): n is a, c, g, or t
  misc_feature (382)..(382): n is a, c, g, or t
  misc_feature (402)..(402): n is a, c, g, or t
  misc_feature (404)..(404): n is a, c, g, or t

SEQ ID NO: 4807 - DNA, 39 bp, Mus musculus
ttcaactgtccaacaaaatccaccaacatgatgggtcat

SEQ ID NO: 4808 - DNA, 39 bp, Mus musculus; identical to SEQ ID NO: 4807

SEQ ID NO: 4809 - DNA, 259 bp, Mus musculus
  misc_feature (29)..(44): n is a, c, g, or t
  misc_feature (47)..(66): n is a, c, g, or t
  misc_feature (68)..(68): n is a, c, g, or t
  misc_feature (71)..(71): n is a, c, g, or t
  misc_feature (100)..(100): n is a, c, g, or t
tatcagacctggaagagaatcctgccacnnnnnnnnnnnnnnnnagnnnnnnnnnnnnnnnnnnnntntcntcttaacacacattaagagtcagactgtntcattagtgccctttcgtgcaatcctgacactaaatatactaaatgtacaaaaatattggtaatatttttattttcaaacttactaaataacctagcttttcattctattccactttccctacatctattttctcttctgcaggaagtaactttgcagt

SEQ ID NO: 4810 - DNA, 259 bp, Mus musculus; identical to SEQ ID NO: 4809
  misc_feature (29)..(44): n is a, c, g, or t
  misc_feature (47)..(66): n is a, c, g, or t
  misc_feature (68)..(68): n is a, c, g, or t
  misc_feature (71)..(71): n is a, c, g, or t
  misc_feature (100)..(100): n is a, c, g, or t

SEQ ID NO: 4811 - DNA, 260 bp, Mus musculus
  misc_feature (26)..(26): n is a, c, g, or t
agcatcccaaagaaagaggcagaganaaggaaaagttgatcctttctgactcaggcctctgaagggcaggcagaccccgaggaacctcctggaggctggtcgggctcaccttattttgttttttaaaattcgtgtggtctgtaggagcctgcaggggctttagaattagattgcgttagatttgtctcctacctcttttcctgttgctatattcggcaagttacttttcctcacttccctccaaaactggaccagttctg

SEQ ID NO: 4812 - DNA, 260 bp, Mus musculus; identical to SEQ ID NO: 4811
  misc_feature (26)..(26): n is a, c, g, or t

SEQ ID NO: 4813 - DNA, 199 bp, Mus musculus
  misc_feature (162)..(162): n is a, c, g, or t
  misc_feature (165)..(165): n is a, c, g, or t
  misc_feature (168)..(168): n is a, c, g, or t
agcagcctggtgtggctcttctcccagctgtacctctactccttcatcagcctcttcatctacatggtgctgagcctcttcattgcactcatcaccggcgcctatgacaccatcaagcacccaggaggtactggcacagagaagagtgagctccaggcctanatngancagtgccaggatagccccacatctggcaagt

SEQ ID NO: 4814 - DNA, 199 bp, Mus musculus; identical to SEQ ID NO: 4813
  misc_feature (162)..(162): n is a, c, g, or t
  misc_feature (165)..(165): n is a, c, g, or t
  misc_feature (168)..(168): n is a, c, g, or t

SEQ ID NO: 4815 - DNA, 494 bp, Mus musculus
  misc_feature (121)..(122): n is a, c, g, or t
  misc_feature (152)..(154): n is a, c, g, or t
  misc_feature (182)..(193): n is a, c, g, or t
  misc_feature (195)..(195): n is a, c, g, or t
  misc_feature (209)..(209): n is a, c, g, or t
  misc_feature (221)..(221): n is a, c, g, or t
  misc_feature (287)..(288): n is a, c, g, or t
  misc_feature (305)..(321): n is a, c, g, or t
  misc_feature (404)..(404): n is a, c, g, or t
  misc_feature (410)..(410): n is a, c, g, or t
  misc_feature (412)..(412): n is a, c, g, or t
tctgctttgggtaccgccctgggaactgctaacctccgattggtccctttgtgtctctgtttactgtcctcttctacctccaggtcacttagctctggctgctctggctgggagtgggggnnggggatgctggctgcacccccaccctggtnnngccaacagaacctgggggcctcacacgnnnnnnnnnnnngncaagctggagctgnagcacactggcncaggctgagtggggcagacaaacaagtggaaggggatctctcaccttagagggaggtggccgaagnngtagatccagcgagggnnnnnnnnnnnnnnnnnccttcatagcagcaagaccttcccatttccaatctcaccctccagcagggatatgactttggacaacaaggctttatttgtanatatgntnttaatatgcaactttgagaataagatagaaacatcatgtattttaaaatataaaatgaagtgtgacacactgtatacaattt

SEQ ID NO: 4816 - DNA, 494 bp, Mus musculus; identical to SEQ ID NO: 4815
  misc_feature (121)..(122): n is a, c, g, or t
  misc_feature (152)..(154): n is a, c, g, or t
  misc_feature (182)..(193): n is a, c, g, or t
  misc_feature (195)..(195): n is a, c, g, or t
  misc_feature (209)..(209): n is a, c, g, or t
  misc_feature (221)..(221): n is a, c, g, or t
  misc_feature (287)..(288): n is a, c, g, or t
  misc_feature (305)..(321): n is a, c, g, or t
  misc_feature (404)..(404): n is a, c, g, or t
  misc_feature (410)..(410): n is a, c, g, or t
  misc_feature (412)..(412): n is a, c, g, or t

SEQ ID NO: 4817 - DNA, 406 bp, Mus musculus
  misc_feature (47)..(63): n is a, c, g, or t
  misc_feature (110)..(110): n is a, c, g, or t
  misc_feature (114)..(140): n is a, c, g, or t
  misc_feature (207)..(207): n is a, c, g, or t
  misc_feature (223)..(223): n is a, c, g, or t
  misc_feature (232)..(232): n is a, c, g, or t
  misc_feature (259)..(259): n is a, c, g, or t
  misc_feature (262)..(262): n is a, c, g, or t
  misc_feature (264)..(264): n is a, c, g, or t
  misc_feature (275)..(275): n is a, c, g, or t
  misc_feature (278)..(278): n is a, c, g, or t
  misc_feature (281)..(281): n is a, c, g, or t
  misc_feature (283)..(283): n is a, c, g, or t
  misc_feature (286)..(286): n is a, c, g, or t
  misc_feature (304)..(304): n is a, c, g, or t
  misc_feature (316)..(316): n is a, c, g, or t
atcccgcagtatgtatgtgacactgttacttaaatctcatagttagnnnnnnnnnnnnnnnnngacgaagctgtgttccatttgccagtgggattttctgcagttgtttncaannnnnnnnnnnnnnnnnnnnnnnnnnnctgctctcctcagaggatggccctgtaaggtagcctgagacaaacctggggtttgaaaggtgacctngggagaacagctctgnttcaatgtncagcagtttacaaagacagctcatcanctnangatgcaccatnttntantntgnataattatttattacatnttgcttggttcntactttttgttggggctcaacattggctcaagaatgctgttaatatttattctgtattgataaaagtctgtcttggcactacaagtaaat

SEQ ID NO: 4818 - DNA, 406 bp, Mus musculus; identical to SEQ ID NO: 4817
  misc_feature (47)..(63): n is a, c, g, or t
  misc_feature (110)..(110): n is a, c, g, or t
  misc_feature (114)..(140): n is a, c, g, or t
  misc_feature (207)..(207): n is a, c, g, or t
  misc_feature (223)..(223): n is a, c, g, or t
  misc_feature (232)..(232): n is a, c, g, or t
  misc_feature (259)..(259): n is a, c, g, or t
  misc_feature (262)..(262): n is a, c, g, or t
  misc_feature (264)..(264): n is a, c, g, or t
  misc_feature (275)..(275): n is a, c, g, or t
  misc_feature (278)..(278): n is a, c, g, or t
  misc_feature (281)..(281): n is a, c, g, or t
  misc_feature (283)..(283): n is a, c, g, or t
  misc_feature (286)..(286): n is a, c, g, or t
  misc_feature (304)..(304): n is a, c, g, or t
  misc_feature (316)..(316): n is a, c, g, or t

SEQ ID NO: 4819 - DNA, 312 bp, Mus musculus
  misc_feature (173)..(213): n is a, c, g, or t
atctactttggcatcagtcatttagtagttgatgtctatctgagaagaaaaaaaaattatcctagatataattgcatttatttatcaacaggtaaaactaagtgaagaaccattactgaagaagtgatattacattttactcttttctcaatgaaacagtaaattagtatttnnnnnnnnnnnnnnnnnnnnnnnnnnnnnnnnnnnnnnnnntctatgtgtcctataataagtaaccttccacattcatgctacctgcttcttttttaaaataattaatgcacataggaacacttcttttgatcatcaggc

SEQ ID NO: 4820 - DNA, 312 bp, Mus musculus; identical to SEQ ID NO: 4819
  misc_feature (173)..(213): n is a, c, g, or t

SEQ ID NO: 4821 - DNA, 390 bp, Mus musculus
  misc_feature (52)..(71): n is a, c, g, or t
  misc_feature (101)..(101): n is a, c, g, or t
  misc_feature (129)..(129): n is a, c, g, or t
  misc_feature (187)..(187): n is a, c, g, or t
cttctggtaattggaagcagcttgactctgcattccccattcctctggttgnnnnnnnnnnnnnnnnnnnnatctgggtggctaacaccatggattataantctctgacagaagatctggtactgggtnctggtgacttcaggcactcccttccctggttgtagtgatcagtttgcaagacttcatnaagcctttttttagggatgaagcccaacttcagacaagactttctctcactatctatcagaaaacagactgacagtagctctgtgagaaacctcaggtactagggagaatatacagagcagtatcttttatttcttccacctctgactctttaaagagcactcttagattgcttaagatatatttcccttcatgaatctgagg

SEQ ID NO: 4822 - DNA, 390 bp, Mus musculus; identical to SEQ ID NO: 4821
  misc_feature (52)..(71): n is a, c, g, or t
  misc_feature (101)..(101): n is a, c, g, or t
  misc_feature (129)..(129): n is a, c, g, or t
  misc_feature (187)..(187): n is a, c, g, or t

SEQ ID NO: 4823 - DNA, 360 bp, Mus musculus
  misc_feature (52)..(52): n is a, c, g, or t
  misc_feature (59)..(60): n is a, c, g, or t
  misc_feature (154)..(154): n is a, c, g, or t
  misc_feature (300)..(301): n is a, c, g, or t
tttgctgaaggctataaacgtgcagcgctatgcaattcttaatttttattangttgttnncccgtttcaaatacacctttggaataagcttcccttaccccagtttttgttgcttgaaaatattgtccctgatttttgttaatatttgtttttntcatttttactttttttttttaaagaagtgtacaggatgccagaaaggagaatggcttaagaattaaaactatgaaatattttacagtttttcttgtacagaatacttggctgttagcccaaggttaaaaagttcataacagattnntttttttttttggactaaatgttgggcagggccctgataagcttcaaagctgctttatt

SEQ ID NO: 4824 - DNA, 360 bp, Mus musculus; identical to SEQ ID NO: 4823
  misc_feature (52)..(52): n is a, c, g, or t
  misc_feature (59)..(60): n is a, c, g, or t
  misc_feature (154)..(154): n is a, c, g, or t
  misc_feature (300)..(301): n is a, c, g, or t

SEQ ID NO: 4825 - DNA, 348 bp, Mus musculus
  misc_feature (84)..(84): n is a, c, g, or t
  misc_feature (94)..(94): n is a, c, g, or t
  misc_feature (128)..(144): n is a, c, g, or t
  misc_feature (195)..(195): n is a, c, g, or t
  misc_feature (203)..(225): n is a, c, g, or t
atggtcacagccagggccagtcccttgagcctatcccttgcgatgaggccagagctccttatcaacctccaggctgctgggatntcaggcagantgtgcgtcagccaccctgccctggctgactgccnnnnnnnnnnnnnnnnnggggcccacacctggggcagcatgtgggcgacacatgcacccggccagctntagtccannnnnnnnnnnnnnnnnnnnnnntacaaggccctgagtggatgcaggggaccctgtctgccccaggaaaggggactaggtagcccatccattcccacccctaccctttcccaccctgcctactccagcctttgagaaatattacag

SEQ ID NO: 4826 - DNA, 348 bp, Mus musculus; identical to SEQ ID NO: 4825
  misc_feature (84)..(84): n is a, c, g, or t
  misc_feature (94)..(94): n is a, c, g, or t
  misc_feature (128)..(144): n is a, c, g, or t
  misc_feature (195)..(195): n is a, c, g, or t
  misc_feature (203)..(225): n is a, c, g, or t

SEQ ID NO: 4827 - DNA, 374 bp, Mus musculus
  misc_feature (233)..(259): n is a, c, g, or t
gtcacagagccaagcctggtaggatttgtctttaaaagtagcaatagtaagagaggcaagtcaagggaaagagaacagtagacatgcctctcatcattctcttggtgtctctttttcttcttcaggccaatgagaagccgaaaattaaaccccacctccatcaaacacagtttttatagattctgacttttttaaaaattcttttctaattattgtaaaaagtatattatatnnnnnnnnnnnnnnnnnnnnnnnnnnngaataaaaattcagcagatctcctttctaggtgcaactgttcagtgaattccctcactaaaagcttaagcaattgtcagtcagaattctgtttgctgagtgctggtgcaggcttt

SEQ ID NO: 4828 - DNA, 374 bp, Mus musculus; identical to SEQ ID NO: 4827
  misc_feature (233)..(259): n is a, c, g, or t

SEQ ID NO: 4829 - DNA, 426 bp, Mus musculus
  misc_feature (113)..(113): n is a, c, g, or t
  misc_feature (119)..(119): n is a, c, g, or t
  misc_feature (131)..(131): n is a, c, g, or t
  misc_feature (195)..(195): n is a, c, g, or t
  misc_feature (198)..(199): n is a, c, g, or t
  misc_feature (205)..(205): n is a, c, g, or t
  misc_feature (214)..(214): n is a, c, g, or t
  misc_feature (227)..(227): n is a, c, g, or t
  misc_feature (307)..(307): n is a, c, g, or t
  misc_feature (363)..(363): n is a, c, g, or t
  misc_feature (387)..(387): n is a, c, g, or t
gaagtggcttttctgaagctgcgtgtaggaaacatccccacacattccctctcttatcagtacatccgctgaccactctggcagagatgctgtgtttgatattagagttacgnacaganttcaagcattgncctggtcttgaaagaactcaagtctttctcattcactaccctatgctaaaaacagataaccttntcnnacatgntatttctgngtcaagaaaaacnattagttgaagttcaaagaaaggagtcacttttttatgtatttattttttggtttgctttccttgttttggtaggtaganattgagttgggtaaaaagcctatttctattttgttttcagattttatattgccttntatttttaatttaatctaacatantcaactgtactttgctataactgctgtatttgttgactg

SEQ ID NO: 4830 - DNA, 426 bp, Mus musculus; identical to SEQ ID NO: 4829
  misc_feature (113)..(113): n is a, c, g, or t
  misc_feature (119)..(119): n is a, c, g, or t
  misc_feature (131)..(131): n is a, c, g, or t
  misc_feature (195)..(195): n is a, c, g, or t
  misc_feature (198)..(199): n is a, c, g, or t
  misc_feature (205)..(205): n is a, c, g, or t
  misc_feature (214)..(214): n is a, c, g, or t
  misc_feature (227)..(227): n is a, c, g, or t
  misc_feature (307)..(307): n is a, c, g, or t
  misc_feature (363)..(363): n is a, c, g, or t
  misc_feature (387)..(387): n is a, c, g, or t

SEQ ID NO: 4831 - DNA, 290 bp, Mus musculus
  misc_feature (30)..(30): n is a, c, g, or t
  misc_feature (32)..(32): n is a, c, g, or t
  misc_feature (39)..(62): n is a, c, g, or t
  misc_feature (146)..(146): n is a, c, g, or t
  misc_feature (161)..(179): n is a, c, g, or t
atagatgctcaaagacacagaagattcgantnttaccannnnnnnnnnnnnnnnnnnnnnnncagcgcacagagatgattaagaaagaagaagaacgcctgagggcctccatcaggagggagtctcagcagcgccggatgcgaganaaacagcaccagcgnnnnnnnnnnnnnnnnnnnctggagcctgatcgctacgacgaggaggaggaaggcgaggagtccgtcagcctggctgccattaaaaaccgctacaaagggggcatccgcgaggaacgagccagaatctac

SEQ ID NO: 4832 - DNA, 290 bp, Mus musculus; identical to SEQ ID NO: 4831
  misc_feature (30)..(30): n is a, c, g, or t
  misc_feature (32)..(32): n is a, c, g, or t
  misc_feature (39)..(62): n is a, c, g, or t
  misc_feature (146)..(146): n is a, c, g, or t
  misc_feature (161)..(179): n is a, c, g, or t

SEQ ID NO: 4833 - DNA, 130 bp, Mus musculus
agagcttttggtttacagactttcataacattctgatcttttataacttactctcccttttctcttacttgatgaacacttatttgagcttatgttttttgataagagaatctgtcctgttttacacacc

SEQ ID NO: 4834 - DNA, 130 bp, Mus musculus; identical to SEQ ID NO: 4833

SEQ ID NO: 4835 - DNA, 197 bp, Mus musculus
  misc_feature (158)..(158): n is a, c, g, or t
  misc_feature (160)..(162): n is a, c, g, or t
  misc_feature (164)..(164): n is a, c, g, or t
cgggcttttggcagtgtacccagcccctctggacctcattccccaaggcgcaaagggagctgctgtctgcccaggcccacttcacccgctgcctgtcttttcccactaccctggagcccagctttgcgccgcagaggacttcgggtgttagcggaggncnnncncgtgtgatcttcatagctctaggccatctcctg

SEQ ID NO: 4836 - DNA, 197 bp, Mus musculus; identical to SEQ ID NO: 4835
  misc_feature (158)..(158): n is a, c, g, or t
  misc_feature (160)..(162): n is a, c, g, or t
  misc_feature (164)..(164): n is a, c, g, or t

SEQ ID NO: 4837 - DNA, 336 bp, Mus musculus
  misc_feature (26)..(40): n is a, c, g, or t
tgtatggtccagagacaaacataccnnnnnnnnnnnnnnntcatgaaattcaccacacctaagaggaaaatattagctgcctccacctactcttggctagtttgttcacttctaggaagtccttttaccatctgttgagaagtcagaaagcatttgttaaacctgccttgattctaagcccgtgctgttgaaaatttgcacattgaacatggacccacttgtacatagaattatttcttcaatcaagtgtgactctaagtatcatgtacatttgcaggctccgaccacctttgtaataacggatgtcatcactgttgctaggataccacattcctc

SEQ ID NO: 4838 - DNA, 336 bp, Mus musculus; identical to SEQ ID NO: 4837
  misc_feature (26)..(40): n is a, c, g, or t

SEQ ID NO: 4839 - DNA, 504 bp, Mus musculus
  misc_feature (167)..(167): n is a, c, g, or t
  misc_feature (177)..(178): n is a, c, g, or t
  misc_feature (183)..(183): n is a, c, g, or t
  misc_feature (190)..(190): n is a, c, g, or t
  misc_feature (337)..(337): n is a, c, g, or t
  misc_feature (341)..(341): n is a, c, g, or t
  misc_feature (344)..(344): n is a, c, g, or t
  misc_feature (361)..(361): n is a, c, g, or t
  misc_feature (397)..(397): n is a, c, g, or t
  misc_feature (461)..(461): n is a, c, g, or t
tctggggagatgctggcagcccctacctcactggacttatctccagtgtcctgcaggctgagcgccccgactcctacctgcagcacttcctcagcctacagcacagcttcctgtgttgtgccttcgccatagtgctaggtggtggcttcttcctgctgactgcactncacctggaannggacnaggcccnggccaggcaacctggcaaaggaactctggacagcaaggacatagccagcaggaacaccgagagccaagggctgctatctggcaccagcaccccaacagagtagccctgagcccctgccttgcagtgagcaggctcaatcctacctanatcntcntggggcccccacccatnttggctgtgactcagggaccccactttttcaatccntgctagagagctgccagggcgcaggagctggctggattgagctgtcaccatcctttagggagtntgggccctgtgtctacaccctccagggagaccaggcccttatt

SEQ ID NO: 4840 - DNA, 504 bp, Mus musculus; identical to SEQ ID NO: 4839
  misc_feature (167)..(167): n is a, c, g, or t
  misc_feature (177)..(178): n is a, c, g, or t
  misc_feature (183)..(183): n is a, c, g, or t
  misc_feature (190)..(190): n is a, c, g, or t
  misc_feature (337)..(337): n is a, c, g, or t
  misc_feature (341)..(341): n is a, c, g, or t
  misc_feature (344)..(344): n is a, c, g, or t
  misc_feature (361)..(361): n is a, c, g, or t
  misc_feature (397)..(397): n is a, c, g, or t
  misc_feature (461)..(461): n is a, c, g, or t

SEQ ID NO: 4841 - DNA, 294 bp, Mus musculus
  misc_feature (111)..(111): n is a, c, g, or t
  misc_feature (113)..(113): n is a, c, g, or t
  misc_feature (115)..(117): n is a, c, g, or t
  misc_feature (119)..(119): n is a, c, g, or t
  misc_feature (121)..(130): n is a, c, g, or t
  misc_feature (135)..(135): n is a, c, g, or t
  misc_feature (145)..(145): n is a, c, g, or t
  misc_feature (152)..(153): n is a, c, g, or t
  misc_feature (157)..(158): n is a, c, g, or t
  misc_feature (161)..(161): n is a, c, g, or t
  misc_feature (164)..(165): n is a, c, g, or t
  misc_feature (219)..(219): n is a, c, g, or t
  misc_feature (243)..(243): n is a, c, g, or t
  misc_feature (245)..(245): n is a, c, g, or t
ggcttttcacaaaactgttatcttgacatacataaaagagcacatactgtagagaaacactattagtgtaacaatgtggtaaagcttttgcatatcatggccgtctttgantncnnnangnnnnnnnnnntacanagaactgatntccatanntgcnnganacnnaacaagagaattgataagataagactgtaagattcagtgtaaatccatactggnttagggattggctcagtggtccantntgcttagtgagcttgaagccttgggtatgattcttagtaccacagatta

SEQ ID NO: 4842 - DNA, 294 bp, Mus musculus; identical to SEQ ID NO: 4841
  misc_feature (111)..(111): n is a, c, g, or t
  misc_feature (113)..(113): n is a, c, g, or t
  misc_feature (115)..(117): n is a, c, g, or t
  misc_feature (119)..(119): n is a, c, g, or t
  misc_feature (121)..(130): n is a, c, g, or t
  misc_feature (135)..(135): n is a, c, g, or t
  misc_feature (145)..(145): n is a, c, g, or t
  misc_feature (152)..(153): n is a, c, g, or t
  misc_feature (157)..(158): n is a, c, g, or t
  misc_feature (161)..(161): n is a, c, g, or t
  misc_feature (164)..(165): n is a, c, g, or t
  misc_feature (219)..(219): n is a, c, g, or t
  misc_feature (243)..(243): n is a, c, g, or t
  misc_feature (245)..(245): n is a, c, g, or t

SEQ ID NO: 4843 - DNA, 354 bp, Mus musculus
  misc_feature (51)..(51): n is a, c, g, or t
  misc_feature (90)..(90): n is a, c, g, or t
  misc_feature (137)..(233): n is a, c, g, or t
ctaccaaggtctggacacggtattaaaacatttaaagttatatttttcagngtttgactattgtaaaatgaaacaaatttcagagctgtnacttaagtggaatgagccattaaatgaagcaacagccaagcacatcnnnnnnnnnnnnnnnnnnnnnnnnnnnnnnnnnnnnnnnnnnnnnnnnnnnnnnnnnnnnnnnnnnnnnnnnnnnnnnnnnnnnnnnnnnnnnnnnngcttcattgacctaggctctttgtttattcagcatgctctccacaataatattccttgtatcacgaagctgttgcatattgctttatcttggccaattacttcagcaaataatgagaagtc

SEQ ID NO: 4844 - DNA, 354 bp, Mus musculus; identical to SEQ ID NO: 4843
  misc_feature (51)..(51): n is a, c, g, or t
  misc_feature (90)..(90): n is a, c, g, or t
  misc_feature (137)..(233): n is a, c, g, or t

SEQ ID NO: 4845 - DNA, 423 bp, Mus musculus
  misc_feature (279)..(301): n is a, c, g, or t
cctccgtggttctctgtaattctgtatttttgtggtggcatgacagggctttttttttgtatgtatcttttctatatttatcaatttttttaaggagtacacaaaacatatatgtatatacatgtagtttttataaaaataatacaatttaaaagattcatttttgtaggtgtaagaaatgcatttcttatatttgtttggtttccaatttatagtggccattactgaacattgtatgtaggaattatgtaattactgtacttttatgtgctggaaatnnnnnnnnnnnnnnnnnnnnnnnggtatgacttgttgatgaatgcaagggattcatagaatgcagacgcagagacagagtttctgttctcagtgatctgtgttgaatggattttgtacttgtttatatgttttatccttggccaa

SEQ ID NO: 4846 - DNA, 423 bp, Mus musculus; identical to SEQ ID NO: 4845
  misc_feature (279)..(301): n is a, c, g, or t

SEQ ID NO: 4847 - DNA, 463 bp, Mus musculus
  misc_feature (140)..(154): n is a, c, g, or t
  misc_feature (160)..(160): n is a, c, g, or t
  misc_feature (166)..(166): n is a, c, g, or t
  misc_feature (168)..(169): n is a, c, g, or t
  misc_feature (171)..(180): n is a, c, g, or t
  misc_feature (182)..(184): n is a, c, g, or t
  misc_feature (186)..(188): n is a, c, g, or t
  misc_feature (190)..(192): n is a, c, g, or t
  misc_feature (194)..(196): n is a, c, g, or t
  misc_feature (198)..(198): n is a, c, g, or t
  misc_feature (200)..(200): n is a, c, g, or t
  misc_feature (207)..(207): n is a, c, g, or t
  misc_feature (216)..(219): n is a, c, g, or t
  misc_feature (221)..(221): n is a, c, g, or t
  misc_feature (227)..(227): n is a, c, g, or t
  misc_feature (229)..(229): n is a, c, g, or t
  misc_feature (231)..(231): n is a, c, g, or t
  misc_feature (233)..(233): n is a, c, g, or t
  misc_feature (238)..(238): n is a, c, g, or t
  misc_feature (240)..(240): n is a, c, g, or t
  misc_feature (245)..(245): n is a, c, g, or t
  misc_feature (253)..(253): n is a, c, g, or t
  misc_feature (294)..(295): n is a, c, g, or t
  misc_feature (347)..(347): n is a, c, g, or t
  misc_feature (351)..(351): n is a, c, g, or t
  misc_feature (355)..(355): n is a, c, g, or t
  misc_feature (428)..(428): n is a, c, g, or t
gtatgctcattcaggcttggccttgcacacagttccaagagattgccagggtcaaagaggagtcacttccccacactttgtcagttctccgagagaatacttgtcgcctctacagtctttgagcagggagcacgagcagnnnnnnnnnnnnnnnggatgnccagtngnntnnnnnnnnnngnnngnnncnnntnnntntntccaagntgaaggatnnnntngagatncngntnaaaantnagcgnaccaggangttaccttggaccctcatcacaaggcttcacttgctggttnntgggtgggtgggtgggtactgtggaatggatttggggtgaggagtagttttncctnctgntcacaaggccctagggtaatcagtgagcaacagaaaaaaaacattatgacacagtgtacaatgagatggccantctggatccctgccctttggcctgggtttcccagc

SEQ ID NO: 4848 - DNA, 463 bp, Mus musculus; identical to SEQ ID NO: 4847
  misc_feature (140)..(154): n is a, c, g, or t
  misc_feature (160)..(160): n is a, c, g, or t
  misc_feature (166)..(166): n is a, c, g, or t
  misc_feature (168)..(169): n is a, c, g, or t
  misc_feature (171)..(180): n is a, c, g, or t
  misc_feature (182)..(184): n is a, c, g, or t
  misc_feature (186)..(188): n is a, c, g, or t
  misc_feature (190)..(192): n is a, c, g, or t
  misc_feature (194)..(196): n is a, c, g, or t
  misc_feature (198)..(198): n is a, c, g, or t
  misc_feature (200)..(200): n is a, c, g, or t
  misc_feature (207)..(207): n is a, c, g, or t
  misc_feature (216)..(219): n is a, c, g, or t
  misc_feature (221)..(221): n is a, c, g, or t
  misc_feature (227)..(227): n is a, c, g, or t
  misc_feature (229)..(229): n is a, c, g, or t
  misc_feature (231)..(231): n is a, c, g, or t
  misc_feature (233)..(233): n is a, c, g, or t
  misc_feature (238)..(238): n is a, c, g, or t
  misc_feature (240)..(240): n is a, c, g, or t
  misc_feature (245)..(245): n is a, c, g, or t
  misc_feature (253)..(253): n is a, c, g, or t
  misc_feature (294)..(295): n is a, c, g, or t
  misc_feature (347)..(347): n is a, c, g, or t
  misc_feature (351)..(351): n is a, c, g, or t
  misc_feature (355)..(355): n is a, c, g, or t
  misc_feature (428)..(428): n is a, c, g, or t

SEQ ID NO: 4849 - DNA, 234 bp, Mus musculus
agttggctgtgtttttaaagcatccagataagcaactccacctctgagaaagtaaatggagacacataaaggtctaaaaaccaggatttcttggtgcagtgttatttataatagtgaaaacttaacaatggtcagaaaattcactcataagggaatggctaaattatggtataagtgcactgtggaaaattttgcagacattaaagtcattgaagactaagactgctgacgtgg

SEQ ID NO: 4850 - DNA, 234 bp, Mus musculus; identical to SEQ ID NO: 4849

SEQ ID NO: 4851 - DNA, 223 bp, Mus musculus
  misc_feature (53)..(56): n is a, c, g, or t
ctcacgaagactggagtagaatgtttggagctcaggaagggtgggtggagtgnnnnctcttccaggtgtgagggatacgaaggaggaagcttagggaaatccattccccactccctcttgccaaatgaggggcccagtccccaacagctcaggtccccagaaccccctagttcctcatgagaagctaggaccagaagcacatcgttccccttatctgagcagt

SEQ ID NO: 4852 - DNA, 223 bp, Mus musculus; identical to SEQ ID NO: 4851
  misc_feature (53)..(56): n is a, c, g, or t

SEQ ID NO: 4853 - DNA, 561 bp, Mus musculus
  misc_feature (294)..(297): n is a, c, g, or t
  misc_feature (299)..(299): n is a, c, g, or t
  misc_feature (301)..(302): n is a, c, g, or t
  misc_feature (304)..(306): n is a, c, g, or t
  misc_feature (308)..(315): n is a, c, g, or t
  misc_feature (317)..(335): n is a, c, g, or t
  misc_feature (377)..(377): n is a, c, g, or t
accacagaggagacactgaagggagtgttttccaaagtgggagctataaagagctgcaccatctcggagaagaagaataaagcaggagtgctcctctcaatggggtttgggtttgtggaatacaagaagccagaacaggcccagaaagccctcaagcagctccagggtcacactgtggacggccataagctggaagtacggatctctgaacgggccactaagcctgccttgacatcaactcggaagaagcaggtccccaagaagcttaagacctgtgtcattttgagtggctgnnnngngnngnnnannnnnnnngnnnnnnnnnnnnnnnnnnncaacttcactcatccaaccaggaagacgtggggagacactantaccacctcagagctgttgtcaccgagggctgaagaggcaccagacaggactctgagcaccaggctttccaactttatgtgagagtcttggcctatgaactttttgccttccagatttgcctggatcccacaccaggttcccaaagatggggccacgccctctcaggggtgctgagaactaagc

SEQ ID NO: 4854 - DNA, 561 bp, Mus musculus; identical to SEQ ID NO: 4853
  misc_feature (294)..(297): n is a, c, g, or t
  misc_feature (299)..(299): n is a, c, g, or t
  misc_feature (301)..(302): n is a, c, g, or t
  misc_feature (304)..(306): n is a, c, g, or t
  misc_feature (308)..(315): n is a, c, g, or t
  misc_feature (317)..(335): n is a, c, g, or t
  misc_feature (377)..(377): n is a, c, g, or t

SEQ ID NO: 4855 - DNA, 282 bp, Mus musculus
agcacacctgtaaggcaagcaccaaattgcacacaagggaacaatagtccatcaatccaaaaggcaactcaagacaatgaaggcaatatattcttgagaaagtgtcaaagtgaatagaaaaactgcttgagtttctttttgtccatgttttttttttcctgccttgttctcttatttgccaaatcacctgtgtatccccatttgcctggactctctcttatttggagtcactttgtgcctctttgtttgttctgctcaggaatcccggcatcttagcagagg

SEQ ID NO: 4856 - DNA, 282 bp, Mus musculus; identical to SEQ ID NO: 4855

SEQ ID NO: 4857 - DNA, 456 bp, Mus musculus
  misc_feature (137)..(137): n is a, c, g, or t
  misc_feature (139)..(139): n is a, c, g, or t
  misc_feature (163)..(163): n is a, c, g, or t
  misc_feature (212)..(213): n is a, c, g, or t
gtgttccttgatgattattcttcacctaatttccccagtaattagataaagacttaggtagagacagctgtatttagaatctagtctgcgtgtggataggcctggacccacatcgtgttgtccctgttcccccatgntntggcattcagttagccaggcactntcttaagtgcttgttggagggaataaagatgccactttttgaatgctanntgtcaactagtgaactagcaatgtagtggcttttggctggattaagggtgaccttttgggtttgcagaagtactctagtaatctaggtagggttttcataacaacaatcaaatttacctccctgggagtgcaaactcacctgcctgtgttccctactagctctgagtaaccacccttgccaggactgtctggcaagtctcagtgaccttgggcacacagcattgctcctaatccttattagag

SEQ ID NO: 4858 - DNA, 456 bp, Mus musculus; identical to SEQ ID NO: 4857
  misc_feature (137)..(137): n is a, c, g, or t
  misc_feature (139)..(139): n is a, c, g, or t
  misc_feature (163)..(163): n is a, c, g, or t
  misc_feature (212)..(213): n is a, c, g, or t

SEQ ID NO: 4859 - DNA, 124 bp, Mus musculus
ttttccatttgagagactacccctgtttcagagccattccccacctattcccttccctgccacctacacccaagtttttcagttttaaattgctgggtccaggccccgaggaggtttttctgag

SEQ ID NO: 4860 - DNA, 398 bp, Mus musculus
  misc_feature (64)..(84): n is a, c, g, or t
  misc_feature (295)..(309): n is a, c, g, or t
gatgcattgtactatcagctactcttccaactctttcgttctgagggtgaaatatgcaaaaaannnnnnnnnnnnnnnnnnnnnttaactgaaacaagcgcttgggtaggcacagcccagtcttatcaagatgctatctagaaccactgctcctttgccttatgcttagctttatttgtctggaatgagataggtctaggttcacttttccccaatgaagatgcagttattctcagcaccacatattaaaagactgtcctttcagctgtcagtctgtggggacatttactcactnnnnnnnnnnnnnnntaaaactattctagaaatgtatattataagtgagaaatgaaggtcctacactctccctctcacccctagcctactatttcttaaaggtg

SEQ ID NO: 4861 - DNA, 45 bp, Mus musculus
ctagagtctctagcatgcagacgcaagacagatttcatgttttca

SEQ ID NO: 4862 - DNA, 198 bp, Mus musculus
tactccatcacatatcttcaaaactctaattatcctccttcctttacattatttattgaacccacccaatcagtgataaataaccctgacatctgcccaatccacaccattttcaattcgagagattactcctatttcagagccattccccacctagtcccatccctcccacctacacccattttctttagctttaag

SEQ ID NO: 4863 - DNA, 85 bp, Mus musculus
ttttgtcgattgttgtgcttccgggggttcgtagcaagcagacgcagggacagactttttattctctactgatctgtgttggttg

SEQ ID NO: 4864 - DNA, 20 bp, Mus musculus
gggggctataagttctttgc

SEQ ID NO: 4865 - DNA, 20 bp, Mus musculus
tccaacacttcgagaggtcc

SEQ ID NO: 4866 - DNA, 21 bp, Mus musculus
gttctttgctgacctgctggc

SEQ ID NO: 4867 - DNA, 20 bp, Mus musculus
tggggctgtactgcttaacc

SEQ ID NO: 4868 - DNA, 22 bp, Mus musculus
cccatgtcagagctgacagaga

SEQ ID NO: 4869 - DNA, 18 bp, Mus musculus
caagggaaaagcaagttg

SEQ ID NO: 4870 - DNA, 18 bp, Mus musculus
atcgtggtgggcaccatc

SEQ ID NO: 4871 - DNA, 19 bp, Mus musculus
tgggggtcacttgaagaag

SEQ ID NO: 4872 - DNA, 18 bp, Mus musculus
cttggctttcagagacga

SEQ ID NO: 4873 - DNA, 18 bp, Mus musculus
tgactataccgaccaatc

SEQ ID NO: 4874 - DNA, 17 bp, Mus musculus
atttagaaatggaggct

SEQ ID NO: 4875 - DNA, 20 bp, Mus musculus
aattcaaccagttctctggg

SEQ ID NO: 4876 - DNA, 20 bp, Mus musculus
aaatgtaaacctaaagtggg

SEQ ID NO: 4877 - DNA, 20 bp, Mus musculus
aaatgtaaacctaaagtggg

SEQ ID NO: 4878 - DNA, 20 bp, Mus musculus
catgaagaggcaaccagaca

SEQ ID NO: 4879 - DNA, 20 bp, Mus musculus
cgaagctagcagcatagcag

What is claimed is:

1. A method for classifying an unknown multilineage-affiliated gene, comprising:
(a) isolating a population of cells;
(b) separating the population of cells into discrete cell sub-populations;
(c) isolating expressed nucleic acid sequences from the discrete cell sub-populations and forming labeled nucleic acid probes from the expressed nucleic acid sequences;
(d) hybridizing the labeled nucleic acid probes with a nucleic acid sequence library on an array, wherein identity and intensity of expression of the expressed nucleic acid sequences are identified to provide gene expression hybridization data;
(e) converting the gene expression hybridization data into a graphical representation, whereby change in gene expression between the discrete cell sub-populations is profiled;
(f) isolating a multilineage-affiliated gene of unknown identity;
(g) determining the unknown gene's expression intensity in each of the discrete sub-populations; and,
(h) comparing the unknown gene's expression pattern with known gene expression patterns in the graphical representation to associate the unknown gene with a group of known genes.

2. The method of claim 1, wherein the discrete sub-populations are selected from the group consisting of HSC, MPP, CMP, and CLP.

3. The method of claim 1, wherein the discrete sub-populations comprise HSC, transitional, and differentiated cells, wherein the differentiated cells are selected from the group consisting of adult, embryonic, neonatal, fetal liver, bone marrow, hematopoictic, splenic, and lymphoid stem cells.

4. The method of claim 1, wherein the discrete cell sub-populations are separated using cell surface markers.

5. The method of claim 1, wherein the expressed nucleic acid sequences comprise non-hematopoietic and hematopoietic genes.

6. The method of claim 1, wherein the expressed nucleic acid sequences are selected from the group consisting of RNA, DNA, and EST nucleic acid sequences.

7. The method of claim 2, wherein the HSC sub-population is identified by expression of genes selected from the group consisting of SEQ ID NOs. 3428-4863.

8. The method of claim 2, wherein the MPP sub-population is identified by expression of genes selected from the group consisting of SEQ ID NOs. 2076-3427.

9. The method of claim 2, wherein the CMP sub-population is identified by expression of genes selected from the group consisting of SEQ ID NOs. 822-2075.

10. The method of claim 2, wherein the CLP sub-population is identified by expression of genes selected from the group consisting of SEQ ID NOs. 1-821.

11. The method of claim 1, wherein the array comprises a substrate and nucleic acid sequences affixed to the substrate, wherein the nucleic acid sequences are selected from the group consisting of SEQ ID NOs. 1-4863.

12. The method of claim 1, wherein the gene expression hybridization data is converted to expression level data, whereby the expression level data are determined by comparing hybridization signals for perfect matches and mismatches of the nucleic acid sequences on the array to provide expression level data for each of the nucleic acid sequences.

13. The method of claim 12, wherein the expression level data is normalized to provide normalized expression data.

14. The method of claim 13, wherein the normalized expression data is filtered using a filter equation given by |yⱼ₍ₘ₎−yⱼ₍ₗ₎|>100 and yⱼ₍ₘ₎/yⱼ₍ₗ₎>2 for j=1, . . . ,n, where yⱼ₍ₘ₎ and yⱼ₍ₗ₎ are the order statistics with yⱼ₍ₗ₎≦ . . . ≦yⱼ₍ₘ₎ for the j^{th} gene, whereby this filtering criterion considers simultaneously the absolute difference (>100) of the gene expression levels and the fold change (>2-fold) of the expression levels for each gene (>100) to produce filtered gene expression data.

15. The method of claim 12, wherein the expression level data for the populations is statistically treated using similarity distance measurements to determine similarity of expressed genes in each population.

16. The method of claim 15, wherein Pearson correlation coefficient is used to compute gene expression intensity and diversity between the discrete sub-populations to establish a statistical measure of expression between sub-populations.

17. The method of claim 14, wherein the filtered expression data is organized using hierarchial clustering.

18. The method of claim 17, wherein the hierarchial clustering is achieved using K-means clustering.

19. The method of claim 1, wherein the graphical representation is made using Eisen software.

20. The method of claim 1, wherein the multilineage-affiliated genes are selected from the group consisting of hematopoietic and non-hematopoietic nucleic acid sequences.

21. The method of claim 18, wherein the K-means clustering method derives representative clusters 1-8.

22. The method of claim 18, wherein the K-means clustering method derives cumulative clusters 1-100.

23. The method of claim 14, wherein the filtered data is selected from SEQ ID NOs 1-4863.

24. A method for characterizing an unknown multilineage-affiliated gene comprising:
(a) profiling multilineage-affiliated gene expression in discrete cell sub-populations to provide expression data for selected genes in at least two discrete cell populations;
(b) isolating an unknown multilineage-affiliated gene;
(c) determining the unknown gene's expression characteristics for each of the sub-populations; and,
(d) comparing the unknown gene's expression data with the expression data.

25. A method for classifying an unknown multilineage-affiliated gene, comprising:
(a) isolating an unknown multilineage-affiliated gene;
(b) determining the unknown gene's expression characteristics in at least two discrete cell sub-populations; and,
(c) comparing the unknown gene's expression characteristics with profiled gene expression data for the cell sub-populations.

26. A method for determining cell stage commitment by comparing nucleic acid expression patterns, comprising:
(a) isolating a population of cells;
(b) separating the population of cells into discrete cell sub-populations;
(c) isolating expressed nucleic acid sequences from the discrete cell sub-populations and forming labeled nucleic acid probes from the expressed nucleic acid sequences;
(d) hybridizing the labeled nucleic acid probes with a nucleic acid sequence library on an array, wherein identity and intensity of expression of the expressed nucleic acid sequences are identified to provide gene expression hybridization data;
(e) converting the gene expression hybridization data into a graphical representation, whereby change in gene expression between the discrete cell sub-populations is profiled;
(f) isolating a cell of unknown commitment;
(g) obtaining gene hybridization data for the unknown cell;
(h) organizing the gene hybridization data, whereby identity of expressed genes is determined along with expression level of the identified genes; and,
(i) comparing the unknown cell's hybridization data with the gene expression data to determine the cell's commitment.

27. The method of claim 26, wherein the graphical representation is a gene cluster expression map.

28. The method of claim 26, wherein the cell sub-populations are selected from the group consisting of CMP, CLP, HSC, and MPP.

29. The method of claim 26, wherein the gene expression hybridization data is normalized to provide expression data, whereby expression of each nucleic acid sequence is standardized relative to all the nucleic acid sequences.

30. The method of claim 26, wherein the normalized expression data is filtered to group genes having similar expression levels.

31. The method of claim 26, wherein the gene expression hybridization data is converted to an expression level which is a comparison of hybridization signals for perfect matches and mismatches to provide average expression levels for the genes.

32. The method of claim 26, wherein the gene expression data for the populations is statistically treated using similarity distance measurements to determine similarity of expressed genes in each population.

33. The method of claim 26, wherein Pearson correlation coefficient is used to plot gene expression intensity and diversity between the discrete sub-populations to establish a statistical measure of expression between sub-populations.

34. The method of claim 26, wherein the normalized gene expression data is organized using hierarchial clustering.

35. The method of claim 26, wherein the hierarchial clustering is achieved using K-means clustering.

36. The method of claim 26, wherein the graphical representation is made using Eisen software.

37. The method of claim 26, wherein the discrete sub-populations comprise HSC, transitional, and differentiated cells, wherein the differentiated cells are selected from the group consisting of adult, embryonic, neonatal, fetal liver, bone marrow, hematopoietic, splenic, and lymphoid stem cells.

38. A method for predicting cell stage commitment comprising:
(a) profiling multilineage-affiliated gene expression in discrete cell sub-populations to provide reference expression data for selected genes in at least two cell populations;
(b) identifying a cell of unknown commitment;
(c) determining gene expression level patterns for the unknown cell to provide gene identity and expression level data; and,
(d) comparing the unknown cell's gene expression level data with the reference expression data.

39. A method for predicting potential of an unknown gene comprising:
(a) isolating an unknown cell;
(b) determining the unknown cell's expression characteristics in at least two cell sub-populations; and,
(c) comparing the unknown cell's expression characteristics with profiled gene expression data for the cell sub-populations.

40. A method for developing a gene expression map, comprising:
(a) isolating at least two sub-populations of cells;
(b) obtaining gene hybridization data, including gene identity data and gene expression intensity data, wherein the genes are multilineage-affiliated genes; and,
(c) converting the gene hybridization expression data to a graphical illustration.

41. The method of claim 40, wherein the graphical illustration is derived using hierarchial clustering.

42. The method of claim 40, wherein the graphical representation is made using Eisen software.

43. The method of claim 40, wherein the discrete sub-populations are selected from the group consisting of HSC, MPP, CMP, and CLP.

44. The method of claim 40, wherein the discrete sub-populations comprise HSC, transitional, and differentiated cells, wherein the differentiated cells are selected from the group consisting of adult, embryonic, neonatal, fetal liver, bone marrow, hematopoietic, splenic, and lymphoid stem cells.

45. The method of claim 40, wherein the discrete cell sub-populations are separated using cell surface markers.

46. The method of claim 40, wherein the gene expression hybridization data is converted to expression level data, whereby the expression level data are determined by comparing hybridization signals for perfect matches and mismatches of the nucleic acid sequences on the array to provide average expression levels for each of the nucleic acid sequences.

47. The method of claim 46, wherein the expression level data is normalized to provide expression data.

48. The method of claim 47, wherein the normalized expression data is filtered to group genes having similar expression levels.

49. The method of claim 46, wherein the normalized expression data is filtered using a filter equation given by |yⱼ₍ₘ₎−yⱼ₍ₗ₎|>100 and yⱼ₍ₘ₎/yⱼ₍ₗ₎>2 for j=1, . . . ,n, where yⱼ₍ₘ₎ and yⱼ₍ₗ₎ are the order statistics with yⱼ₍ₗ₎≦ . . . ≦yⱼ₍ₘ₎ for the j^{th} gene, whereby this filtering criterion considers simultaneously the absolute difference (>100) of the gene expression levels and the fold change (>2-fold) of the expression levels for each gene (>100) to produce filtered expression data.

50. The method of claim 46, wherein the expression level data for the populations is statistically treated using similarity distance measurements to determine similarity of expressed genes in each population.

51. The method of claim 50, wherein Pearson correlation coefficient is used to compute gene expression intensity and diversity between the discrete sub-populations to establish a statistical measure of expression between sub-populations.

52. The method of claim 48, wherein the filtered expression data is organized using hierarchial clustering.

53. The method of claim 52, wherein the hierarchial clustering is achieved using K-means clustering.

54. The method of claim 40, wherein the multilineage-affiliated genes are selected from the group consisting of hematopoietic and non-hematopoietic nucleic acid sequences.

55. A method for forming a hierarchial gene clustering map comprising:
(a) isolating at least two sub-populations of cells;
(b) obtaining gene hybridization data, including gene identity data and gene expression intensity data, wherein the genes are multilineage-affiliated genes;
(c) normalizing the gene hybridization expression data to provide expression data;
(d) filtering the normalized expression data to group genes having similar expression levels;
(e) organizing the normalized expression data using hierarchal clustering; and,
(f) converting the hierarchal clustering data to a graphical illustration.

56. The method of claim 55, wherein the map has an axis with standard deviation values derived from the normalized gene expression values and an axis with at least two cell populations.

57. The method of claim 55, wherein the gene expression between sub-populations is represented by a standard deviation in expression between genes in one sub-population versus another, whereby up-regulation and down-regulation are represented.

58. The method of claim 55, wherein the standard deviation values range between −1.5 and +1.5, whereby −1.5 represents down-regulation and +1.5 represents up-regulation.

59. The method of claim 55, wherein filtered expression data selects nucleic acid sequences selected from the group consisting of SEQ ID NOs. 1-4863.

60. The method of claim 55, wherein the clusters are selected from the group consisting of representative clusters 1-8.

61. The method of claim 55, wherein the clusters are selected from the group consisting of cumulative clusters 1-100.

62. An array comprising a plurality of nucleic acid sequences affixed to a substrate, wherein the nucleic acid sequences are selected from the group consisting of representative clusters 1-8 and cumulative clusters 1-100.

63. An array comprising a plurality of nucleic acid sequences affixed to a substrate, wherein the nucleic acid sequences are selected from the group consisting of SEQ ID NOs. 1-4863.

64. An array comprising a plurality of nucleic acid sequences affixed to a substrate, wherein the nucleic acid sequences are selected from the group consisting of SEQ ID NOs. 3428-4863.

65. An array comprising a plurality of nucleic acid sequences affixed to a substrate, wherein the nucleic acid sequences are selected from the group consisting of SEQ ID NOs. 1-821.

66. An array comprising a plurality of nucleic acid sequences affixed to a substrate, wherein the nucleic acid sequences are selected from the group consisting of SEQ ID NOs. 2076-3427.

67. An array comprising a plurality of nucleic acid sequences affixed to a substrate, wherein the nucleic acid sequences are selected from the group consisting of SEQ ID NOs. 822-2075.

68. A kit for characterizing a gene of unknown function by associating it with genes of HSC, MPP, CMP, and CLP reference cell sub-populastions comprising:
(a) a container;
(b) at least one nucleic acid sequence array selected from the arrays of claims 62-67; and,
(c) an activated label.

69. The kit of claim 68, wherein the solid phase matrix is selected from the group consisting of glass, silicon, plastic, and semi-conductor material.

70. A group of nucleic acid sequences for use in determining cell commitment comprising SEQ ID NOs. 1-4863.

71. A group of nucleic acid sequences representative of HSC, comprising SEQ ID NOs. 3428-4863.

72. A group of nucleic acid sequences representative of CLP, comprising SEQ ID NOs. 1-821.

73. A group of nucleic acid sequences representative of MPP, comprising SEQ ID NOs. 2076-3427.

74. A group of nucleic acid sequences representative of CMP, comprising SEQ ID NOs. 822-2075.

75. A gene cluster for use in analyzing cell differentiation selected from the group consisting of cumulative gene clusters 1-100.

76. The gene cluster of claim 75, wherein nucleic acid sequences of SEQ ID NOs. 14863 form the cumulative gene clusters.

77. A gene cluster selected from the group consisting of representative gene clusters 1-8.

78. A population of non-hematopoiesis-affiliated genes, which comprise genes listed in FIG. 3.

79. A population of genes upregulated in CMP, comprising genes listed in FIG. 4D.

80. A population of genes upregulated in HSC, comprising genes listed in FIG. 4A.

81. A population of genes upregulated in CLP, comprising genes listed in FIG. 4C.

82. A population of genes upregulated in MPP, comprising genes listed in FIG. 4B.

83. A gene cluster map for use in analysis of multilineage-affiliated genes, comprising:
(a) an axis related to at least two cell populations;
(b) an axis comprising normalized gene expression values; and,
(c) a plot of genes clustered according to K-means clustering.

84. The gene cluster map of claim 83, wherein the normalized gene expression values are computed as standard deviations of a normalized value of gene expression, where the computation on expression level of a gene minus means of expression levels of this gene's standard deviation of the expression level.

85. The gene cluster map of claim 83, wherein normalized gene expression values are figured by a comparison between hybridization signals of a PM and a MM.

86. The gene cluster map of claim 83, wherein the standard deviation ranges between −1.5 and 1.5.

87. The gene cluster map of claim 83, wherein the normalized gene expression values are screened for clustering analysis by filtering.

88. A method for gene expression profiling, comprising:
(a) isolating a population of cells;
(b) separating the population of cells into discrete cell sub-populations;
(c) isolating expressed nucleic acid sequences from the discrete cell sub-populations and forming labeled nucleic acid probes from the expressed nucleic acid sequences;
(d) hybridizing the labeled nucleic acid probes with a nucleic acid sequence library on an array, wherein identity and intensity of expression of the expressed nucleic acid sequences are identified to provide gene expression hybridization data; and,
(e) converting the gene expression hybridization data into a graphical representation, whereby change in gene expression between the discrete cell sub-populations is profiled.

89. A computer system comprising:
(a) a storage device having stored therein a gene data expression routine for compiling gene expression signal data for one or more signals associated with hybridization of labeled nucleic acid probes with a nucleic acid sequence library on an array for an available set of expressed genes;
(b) a processor coupled to the storage device for executing the gene data expression routine to determine the intensity of gene expression for each of a plurality of discrete sub-populations comprising the steps of:
(i) collecting identity and expression intensity information to construct gene expression patterns;
(ii) mapping gene expression patterns to form gene cluster expression maps for each of the discrete cell sub-populations;
(iii) determining an unknown gene's expression intensity in each of the discrete sub-populations to determine the expression level of the gene in each of the discrete sub-populations;
(iv) comparing the unknown gene's expression pattern with the gene cluster expression maps; and
(v) associating the unknown gene with one of the gene clusters to classify the unknown gene.

90. A method for determining cell stage commitment, comprising:
(a) isolating a population of cells;
(b) separating the population of cells into discrete cell sub-populations;
(c) isolating expressed nucleic acid sequences from the discrete cell sub-populations and forming labeled nucleic acid probes from the expressed nucleic acid sequences;
(d) hybridizing the labeled nucleic acid probes with a nucleic acid sequence library on an array, wherein identity and intensity of expression of the expressed nucleic acid sequences are identified to provide gene expression hybridization data;
(e) converting the gene expression hybridization data into normalized expression data, whereby change in gene expression between the discrete cell sub-populations is profiled;
(f) isolating a multilineage-affiliated gene of unknown identity;
(g) determining the unknown gene's expression intensity in each of the discrete sub-populations; and,
(h) comparing the unknown gene's expression pattern with known gene expression patterns in the graphical representation to associate the unknown gene with a group of known genes.

91. A method for classifying an unknown multilineage-affiliated gene, comprising:
(a) isolating a population of cells;
(b) separating the population of cells into discrete cell sub-populations;
(c) isolating expressed nucleic acid sequences from the discrete cell sub-populations and forming labeled nucleic acid probes from the expressed nucleic acid sequences;
(d) hybridizing the labeled nucleic acid probes with a nucleic acid sequence library on an array, wherein identity and intensity of expression of the expressed nucleic acid sequences are identified to provide gene expression hybridization data;
(e) converting the gene expression hybridization data into normalized expression data, whereby change in gene expression between the discrete cell sub-populations is profiled;
(f) isolating a multilineage-affiliated gene of unknown identity;
(g) determining the unknown gene's expression intensity in each of the discrete sub-populations; and,
(h) comparing the unknown gene's expression pattern with known gene expression patterns in the normalized expression data to associate the unknown gene with a group of known genes.

92. A method for developing a gene expression map, comprising:
(a) isolating at least two sub-populations of cells;
(b) obtaining gene hybridization data, including gene identity data and gene expression intensity data, wherein the genes are multilineage-affiliated genes; and,
(c) converting the gene hybridization expression data to normalized gene expression data.
